(19) United States
(12) Patent Application Publication
(10) Pub. No.: US 2025/0276080 A1
(43) Pub. Date: Sep. 4, 2025

(54) GLUCAGON RECEPTOR AGONISTS AND CONJUGATES TO GLUCOSE-DEPENDENT INSULINOTROPIC POLYPEPTIDE ANTAGONISTS

(71) Applicant: AMGEN INC., Thousand Oaks, CA (US)

(72) Inventors: James R. FALSEY, Moorpark, CA (US); Bin WU, Thousand Oaks, CA (US); Shu-Chen LU, Thousand Oaks, CA (US); Kelvin K.C. SHAM, Thousand Oaks, CA (US); Yuan CHENG, Newbury Park, CA (US); Leslie P. MIRANDA, Thousand Oaks, CA (US); Murielle Marie VENIANT-ELLISON, Thousand Oaks, CA (US); Jennifer ARAL, Newbury Park, CA (US)

(73) Assignee: AMGEN INC., Thousand Oaks, CA (US)

(21) Appl. No.: 19/065,310

(22) Filed: Feb. 27, 2025

Related U.S. Application Data
(60) Provisional application No. 63/559,342, filed on Feb. 29, 2024.

(51) Int. Cl. A61K 47/68; A61P 3/04; C07K 14/605; C07K 16/28

(52) U.S. Cl. CPC A61K 47/6811; A61K 47/6849; A61P 3/04; C07K 14/605; C07K 16/2869; C07K 2317/24; C07K 2317/92

(57) ABSTRACT

Disclosed herein are polypeptides having activity as agonists of a glucagon receptor (“GCGR”), molecules comprising such polypeptides and a half-life extending domain (e.g., an Fc-containing polypeptide), including molecules comprising an antibody that specifically binds to a glucose-dependent insulinotropic polypeptide receptor (“GIPR”), pharmaceutical compositions comprising such polypeptides and molecules, and methods of using such polypeptides, molecules, and pharmaceutical compositions in weight management and the treatment of certain disorders such as obesity.

### CROSS-REFERENCE TO RELATED APPLICATIONS

[0001] This application claims the benefit of priority to U.S. Provisional Patent Application No. 63/559,342, filed Feb. 29, 2024, which is hereby incorporated by reference in its entirety.

### SUBMISSION OF SEQUENCE LISTING

[0002] The content of the following Sequence Listing XML is incorporated herein by reference in its entirety: file name: 10674-WO01-SEC_Seglisting, date created: Feb. 21, 2025; size: 1,917,591 bytes.

### FIELD

[0003] The present disclosure provides polypeptides that agonize a glucagon receptor (“GCGR”), molecules comprising such polypeptides and a half-life extending domain (e.g., an Fc-containing polypeptide), including molecules comprising a polypeptide that agonizes a GCGR and an antibody that specifically binds to a glucose-dependent insulinotropic polypeptide receptor (“GIPR”), pharmaceutical compositions comprising such polypeptides and molecules, and methods of using such polypeptides, molecules, and pharmaceutical compositions in weight management and the treatment of obesity.

### BACKGROUND

[0004] Obesity is a chronic, heterogeneous, neurometabolic disease that has grown into an extremely prevalent public health problem. Obesity is projected to affect nearly a quarter of the world's population by 2035 (World Obesity Federation's World Obesity Atlas 2023), and obesity-associated morbidity has exerted a tremendous burden on patients and the healthcare system globally.

[0005] Incretin-based therapeutics have transformed type 2 diabetes management, with some recently developed agents, such as the glucagon-like peptide-1 (GLP-1) agonist semaglutide and the GLP-1/glucose-dependent insulinotropic polypeptide (GIP) dual agonist tirzepatide, also promoting notable weight reductions in diabetic and non-diabetic patients. GLP-1 and GIP are endogenous, gut-derived incretin hormones that regulate weight through their receptors. These incretins augment glucose-stimulated insulin secretion and play important roles in weight regulation. For example, GIP promotes fat storage in adipocytes, as well as pancreatic islet j-cell function and glucose-dependent insulin secretion, while GLP-1 promotes satiety.

[0006] GIP, formerly known as gastric inhibitory polypeptide, is a single 42-amino acid peptide secreted from K-cells in the small intestine (duodenum and jejunum). Food ingestion induces GIP secretion. Human GIP is derived from the processing of proGIP, a 153-amino acid precursor that is encoded by a gene localized to chromosome 17q. (Inagaki et al., Mol Endocrinol 1989, 3:1014-1021; Fehmann et al. Endocr Rev. 1995; 16:390-410.)

[0007] The GIP receptor (GIPR) is a member of the secretin-glucagon family of G-protein coupled receptors (GPCRs). GIPR is expressed in a number of tissues, including the pancreas, gut, adipose tissue, heart, pituitary, adrenal cortex, and brain. (Usdin et al., Endocrinology, 1993, 133:2861-2870.) GIPR knockout mice (Gipr^{-/-}) are resistant to high fat diet-induced weight gain and have improved insulin sensitivity and lipid profiles. (Yamada et al., Diabetes, 2006, 55:S86; Miyawaki et al., Nature Med., 2002, 8:738-742.)

[0008] GLP-1 is a 31-amino acid peptide derived from the proglucagon gene. It is secreted by intestinal L-cells and released in response to food ingestion to induce insulin secretion from pancreatic β-cells. (Baggio et al., Diabetes, 2004, 53(S3):S205-S214.) In addition to its incretin effects, GLP-1 also decreases glucagon secretion, delays gastric emptying, and reduces caloric intake. (Drucker, Diabetes Care, 2003, 26(10): 2929-2940.) GLP-1 exerts its effects by activating the GLP-1 receptor, which belongs to a class B G-protein-coupled receptor. GLP-1 is rapidly degraded by the DPP-IV enzyme, resulting in a physiological half-life of approximately two minutes. Recently, long-lasting GLP-1 receptor agonists (GLP-1 RAs) such as exenatide, liraglutide, dulaglutide, and semaglutide have been developed and are now being used clinically to improve glycemic control in patients with type 2 diabetes.

[0009] While incretin-based therapeutics have transformed the obesity treatment landscape, not all patients are able to tolerate GLP-1-based therapies, which have been associated with an increased risk of gastrointestinal adverse events (e.g., biliary disease, pancreatitis, bowel obstruction, and gastroparesis) in some patients. (Sodhi et al., JAMA, 2023, 330(18):1795-1797.) Moreover, some patients hit a weight loss plateau on GLP-1-based therapies but still need to further reduce their body weight. Accordingly, there remains a need for alternative therapeutic agents for use in weight management and the treatment or amelioration of obesity.

### SUMMARY

[0010] Glucagon is a 29-amino acid peptide hormone (HSQGT FTSDY SKYLD SRRAQ DFVQW LMNT (SEQ ID NO: 1576)) secreted by α-cells of the islet of Langerhans in the pancreas. Glucagon is involved in glucose homeostasis, lipolysis, and amino acid catabolism. Under normal physiological conditions, glucagon levels increase when blood glucose falls, which causes glycogen in the liver to be broken down into glucose for release into the bloodstream. Acute glucagon administration has been associated with increased energy expenditure and circulating insulin and glucose concentrations in adults without diabetes. (Frampton et al., IJO, 2022, 48:1948-1959.)

[0011] Provided herein are polypeptides having activity as agonists of a glucagon receptor (“GCGR”) and molecules comprising such polypeptides and a half-life extending domain (e.g., an Fc-containing polypeptide), including molecules comprising an antibody that specifically binds to a glucose-dependent insulinotropic polypeptide receptor (“GIPR”). These polypeptides and molecules, e.g., molecules comprising an anti-GIPR antibody and a GCGR agonist (“GIPR×GCG”), may reduce body weight, liver weight, and fat mass and improve plasma glucose and insulin levels and plasma lipid profiles in obese subjects, alone or in combination with GLP-1 based therapies, e.g., semaglutide. Also provided herein are pharmaceutical compositions comprising these polypeptides and molecules, uses of the polypeptides, molecules, and pharmaceutical compositions in weight management and the treatment of, for example, obesity.

[0012] One aspect of the disclosure provides a polypeptide that agonizes a glucagon receptor (“GCGR”), wherein:
[0013] the polypeptide comprises at least 25 amino acids, wherein the polypeptide comprises 5-bromo-tryptophan at position 25; and
[0014] the polypeptide has at least 79% (e.g., at least 82%, at least 86%, at least 93%, at least 96%, or 100%) sequence identity to the amino acid sequence of SEQ ID NO: 1587.

[0015] Another aspect of the disclosure provides polypeptide that agonizes a GCGR, wherein:
[0016] the polypeptide comprises at least 28 amino acids, wherein the polypeptide comprises 2-aminoisobutyric acid at position 16 and lysine, serine, or aspartic acid at position 28; and
[0017] the polypeptide has at least 89% (e.g., at least 93%, at least 96%, or 100%) sequence identity to the amino acid sequence of SEQ ID NO: 1596.

[0018] Still another aspect of the disclosure provides a polypeptide that agonizes a GCGR, wherein:
[0019] the polypeptide comprises at least 28 amino acids, wherein the polypeptide comprises 2-aminoisobutyric acid at position 16, leucine at position 27, and lysine at position 28; and
[0020] the polypeptide has at least 89% sequence identity to the amino acid sequence of SEQ ID NO: 1615.

[0021] Yet another aspect of the disclosure provides a polypeptide that agonizes a GCGR, wherein:
[0022] the polypeptide comprises at least 28 amino acids, wherein the polypeptide comprises 2-aminoisobutyric acid at position 16, aspartic acid at position 24, and lysine at position 28; and
[0023] the polypeptide has at least 89% (e.g., at least 93%, at least 96%, or 100%) sequence identity to the amino acid sequence of SEQ ID NO: 1626.

[0024] In some embodiments, the polypeptide further comprises d-serine at position 2. In some embodiments, the polypeptide further comprises lysine at position 17. In some embodiments, the polypeptide further comprises d-serine at position 2 and lysine at position 17.

[0025] Another aspect of the disclosure provides a polypeptide that agonizes a GCGR, wherein:
[0026] the polypeptide comprises at least 28 amino acids, wherein the polypeptide comprises a d-serine at position 2 and a 2-aminoisobutyric acid at position 16; and
[0027] the polypeptide has at least 89% (e.g., at least 93%, at least 96%, or 100%) sequence identity to the amino acid sequence of SEQ ID NO: 1822.

[0028] A further aspect of the disclosure provides a polypeptide comprising an amino acid sequence with between three and nine modifications relative to SEQ ID NO: 1576, wherein the modifications are selected from:
[0029] tyrosine and phenylalanine at position 1;
[0030] d-serine, 2-aminoisobutyric acid, and d-threonine at position 2;
[0031] glutamic acid at position 3;
[0032] histidine at position 7;
[0033] tryptophan at position 10;
[0034] glutamic acid at position 15;
[0035] 2-aminoisobutyric acid, glutamine, homophenylalanine, and glutamic acid at position 16;
[0036] lysine, citrulline, glutamine, and alanine at position 17;
[0037] 2-naphthylalanine, L-4,4′-biphenylalanine, alanine, citrulline, and lysine at position 18;
[0038] 4-chloro-L-phenylalanine, alanine, d-glutamine, homoserine, histidine, arginine, and glutamic acid at position 20;
[0039] glutamic acid, citrulline, and d-aspartic acid at position 21;
[0040] tryptophan and β-cyclohexyl-L-alanine at position 22;
[0041] aspartic acid, lysine, alanine, 2-aminoisobutyric acid, glycine, histidine, asparagine, threonine, d-glutamine, glutamic acid, arginine, phenylalanine, leucine, serine, tyrosine, valine, isoleucine, homoserine, and 2,3-diaminopropionic acid at position 24;
[0042] 5-bromo-L-tryptophan, tyrosine, L-beta-homotryptophan, 5-methoxy-L-tryptophan, 5-methyl-L-tryptophan, 6-bromo-L-tryptophan, 6-chloro-L-tryptophan, 6-methyl-L-tryptophan, and 7-bromo-L-tryptophan at position 25;
[0043] leucine, glutamic acid, and L-α-aminoadipic acid at position 27;
[0044] lysine, aspartic acid, serine, 6-azido-L-lysine, glutamic acid, and alanine at position 28;
[0045] glutamic acid, serine, aspartic acid, and alanine at position 29;
[0046] an additional amino acid at position 30, wherein the additional amino acid is lysine; and
[0047] an additional amino acid at position 31, wherein the additional amino acid is lysine.

[0048] In some embodiments, the polypeptide comprises 31 amino acids. In some embodiments, the polypeptide comprises 31 amino acids, wherein the additional amino acid at position 30 is lysine and the additional amino acid at position 31 is lysine.

[0049] In some embodiments, the polypeptide comprises 29 amino acids.

[0050] In some embodiments, the modifications comprise a d-serine at position 2, a 2-aminoisobutyric acid at position 16, and between one and seven other modifications at positions 1, 3, 7, 10, 15, 17, 18, 20, 21, 22, 24, 25, 26, 27, 28, 29, 30, or 31 (e.g., at positions 17, 21, 24, 25, 27, 28, or 29) as described above. In some embodiments, the modifications are selected from:
[0051] lysine at position 17;
[0052] glutamic acid at position 21;
[0053] lysine, alanine, and glutamic acid at position 24;
[0054] 5-bromo-L-tryptophan at position 25;
[0055] leucine and glutamic acid at position 27;
[0056] lysine, aspartic acid, and glutamic acid at position 28; and
[0057] glutamic acid and serine at position 29.

[0058] In some embodiments, the polypeptide comprises 29 amino acids.

[0059] Another aspect of the disclosure provides a polypeptide that agonizes a GCGR comprising the amino acid sequence of any one of SEQ ID NOs: 1587-1627, 1747-1840, 1859-1862, or 1879-1881. In some embodiments, the polypeptide comprises the amino acid sequence of any one of SEQ ID NOs: 1587-1627 or 1747. In some embodiments, the polypeptide comprises the amino acid sequence of any one of SEQ ID NOs: 1747-1840, 1859-1862, or 1879-1881.

[0060] Still another aspect of the disclosure provides a polypeptide that agonizes a GCGR comprising the amino acid sequence of any one of SEQ ID NOs: 1587-1627.

[0061] Yet another aspect of the disclosure provides a molecule comprising:
[0062] a first polypeptide that agonizes a GCGR, wherein the first polypeptide is selected from those described herein; and
[0063] a second polypeptide comprising the amino acid sequence of any one of SEQ ID NOs: 1628-1683 (preferably SEQ ID NO: 1628 or SEQ ID NO: 1629),
[0064] wherein the C-terminus of the second polypeptide is covalently linked to an ε-amino group of a lysine residue of the first polypeptide.

[0065] In some embodiments, the first polypeptide is glucagon or a glucagon analog. In some embodiments, the first polypeptide is glucagon. In some embodiments, the first polypeptide is human glucagon. In some embodiments, the first polypeptide is a human glucagon analog.

[0066] In some embodiments, the first polypeptide comprises an amino acid sequence selected from SEQ ID NOs: 1587-1627, 1747-1749, 1751-1792, 1794-1798, 1801-1830, 1833-1840, and 1859-1862. In some embodiments, the first polypeptide comprises an amino acid sequence selected from SEQ ID NOs: 1587-1627 and 1747.

[0067] In some embodiments, the N-terminal amino acid residue of the second polypeptide is modified for coupling to a cysteine residue (e.g., is bromoacetylated).

[0068] Another aspect of the disclosure provides a molecule comprising:
[0069] a first polypeptide that agonizes a GCGR, wherein the first polypeptide is selected from those described herein; and
[0070] a second polypeptide comprising the amino acid sequence of any one of SEQ ID NOs: 1628-1683, 1739, 1850, or 1851,
[0071] wherein the C-terminus of the second polypeptide is covalently linked to an ε-amino group of a lysine residue of the first polypeptide.

[0072] In some embodiments, the first polypeptide comprises an amino acid sequence selected from SEQ ID NOs: 1587-1627, 1747-1749, 1751-1792, 1794-1798, 1801-1830, 1833-1840, and 1859-1862. In some embodiments, the second polypeptide comprises the amino acid sequence of any one of SEQ ID NOs: 1628, 1629, 1630, 1631, 1632, 1640, or 1644. In some embodiments, the first polypeptide comprises an amino acid sequence selected from SEQ ID NOs: 1587-1627, 1747-1749, 1751-1792, 1794-1798, 1801-1830, 1833-1840, and 1859-1862, and the second polypeptide comprises an amino acid sequence selected from SEQ ID NOs: 1628, 1629, 1630, 1631, 1632, 1640, or 1644.

[0073] In some embodiments, the C-terminal amino acid residue of the first polypeptide is modified (e.g., amidated).

[0074] In some embodiments, the N-terminal amino acid residue of the second polypeptide is modified for coupling to a cysteine residue (e.g., is bromoacetylated).

[0075] Yet another aspect of the disclosure provides a molecule comprising
[0076] a first polypeptide that agonizes a GCGR, wherein the first polypeptide is selected from those described herein; and
[0077] a second polypeptide comprising the amino acid sequence of any one of SEQ ID NOs: 1740-1746, 1841-1849, or 1852,
[0078] wherein the C-terminus/C-terminal amino acid residue of the first polypeptide is covalently linked to the N-terminus/N-terminal amino acid residue of the second polypeptide.

[0079] In some embodiments, the first polypeptide is glucagon or a glucagon analog. In some embodiments, the first polypeptide is glucagon. In some embodiments, the first polypeptide is human glucagon. In some embodiments, the first polypeptide is a glucagon analog. In some embodiments, the first polypeptide is a human glucagon analog.

[0080] In some embodiments, the first polypeptide comprises an amino acid sequence selected from SEQ ID NOs: 1793, 1799, 1800, 1831, and 1832.

[0081] In some embodiments, the C-terminal amino acid residue of the second polypeptide is a lysine residue. In some embodiments, the C-terminal amino acid residue of the second polypeptide is modified for coupling to a cysteine residue (e.g., is bromoacetylated). In some embodiments, the C-terminal amino acid residue of the second polypeptide is a bromoacetylated lysine residue.

[0082] Still another aspect of the disclosure provides a molecule comprising a polypeptide that agonizes a GCGR, wherein the polypeptide is selected from those described herein; and an antigen-binding protein. In some embodiments, the polypeptide comprises an amino acid sequence selected from SEQ ID NOs: 1587-1627, 1747-1840, and 1859-1862. In some embodiments, the polypeptide comprises an amino acid sequence selected from SEQ ID NOs: 1587-1627 and 1747. In some embodiments, the polypeptide comprises an amino acid sequence selected from SEQ ID NOs: 1747-1840 and 1859-1862.

[0083] Yet another aspect of the disclosure provides a molecule comprising: a polypeptide that agonizes a GCGR, wherein the polypeptide is selected from those described herein; and a half-life extending domain (e.g., an Fc-containing polypeptide, such as, e.g., an antibody). In some embodiments, the polypeptide comprises an amino acid sequence selected from SEQ ID NOs: 1587-1627, 1747-1840, and 1859-1862. In some embodiments, the polypeptide comprises an amino acid sequence selected from SEQ ID NOs: 1587-1627 and 1747. In some embodiments, the polypeptide comprises an amino acid sequence selected from SEQ ID NOs: 1747-1840 and 1859-1862.

[0084] Still another aspect of the disclosure provides a molecule comprising a polypeptide that agonizes a GCGR, wherein the polypeptide is selected from those described herein; and an antibody that specifically binds to a glucose-dependent insulinotropic polypeptide receptor (“GIPR”).

[0085] In some embodiments, the polypeptide is glucagon or a glucagon analog. In some embodiments, the polypeptide is glucagon. In some embodiments, the polypeptide is human glucagon. In some embodiments, the polypeptide is a glucagon analog. In some embodiments, the polypeptide is a human glucagon analog.

[0086] In some embodiments, the polypeptide comprises an amino acid sequence selected from SEQ ID NOs: 1587-1627, 1747-1840, and 1859-1862. In some embodiments, the polypeptide comprises an amino acid sequence selected from SEQ ID NOs: 1587-1627 and 1747. In some embodiments, the polypeptide comprises an amino acid sequence selected from SEQ ID NOs: 1747-1840 and 1859-1862.

[0087] Another aspect of the disclosure provides a molecule comprising: a polypeptide that agonizes a glucagon receptor (“GCGR”); a linker polypeptide; and an antibody that specifically binds to a glucose-dependent insulinotropic polypeptide receptor (“GIPR”), wherein:
[0088] a lysine residue or an azido-lysine residue of the polypeptide is covalently linked to a C-terminus of the linker polypeptide; and
[0089] an N-terminus of the linker polypeptide is conjugated to a cysteine residue of the antibody.

[0090] In some embodiments, the polypeptide is glucagon or a glucagon analog. In some embodiments, the polypeptide is glucagon. In some embodiments, the polypeptide is human glucagon. In some embodiments, the polypeptide is a glucagon analog. In some embodiments, the polypeptide is a human glucagon analog.

[0091] In some embodiments, the polypeptide comprises an amino acid sequence selected from SEQ ID NOs: 1587-1627, 1747-1840, and 1859-1862. In some embodiments, the polypeptide comprises an amino acid sequence selected from SEQ ID NOs: 1587-1627 and 1747. In some embodiments, the polypeptide comprises an amino acid sequence selected from SEQ ID NOs: 1747-1840 and 1859-1862.

[0092] In some embodiments, an ε-amino group of a lysine residue at position 21, position 24, position 28, or position 31 (e.g., at position 24 or position 28) of the polypeptide is covalently linked to a C-terminus of the linker polypeptide. In some embodiments, an azido-lysine residue at position 28 of the polypeptide is covalently linked to a C-terminus of the linker polypeptide.

[0093] In some embodiments, the C-terminal amino acid residue of the polypeptide is modified (e.g., amidated).

[0094] Yet another aspect of the disclosure provides a molecule comprising: a polypeptide that agonizes a glucagon receptor (“GCGR”); a linker polypeptide; and an antibody that specifically binds to a glucose-dependent insulinotropic polypeptide receptor (“GIPR”),
[0095] wherein:
   [0096] an ε-amino group of a lysine residue of the polypeptide is covalently linked to a C-terminus of the linker polypeptide; and
[0097] an N-terminus of the linker polypeptide is conjugated to a cysteine residue of the antibody.

[0098] In some embodiments, the polypeptide is glucagon or a glucagon analog. In some embodiments, the polypeptide is glucagon. In some embodiments, the polypeptide is human glucagon. In some embodiments, the polypeptide is a glucagon analog. In some embodiments, the polypeptide is a human glucagon analog.

[0099] In some embodiments, the polypeptide comprises an amino acid sequence selected from SEQ ID NOs: 1587-1627, 1747-1840, and 1859-1862. In some embodiments, the polypeptide comprises an amino acid sequence selected from SEQ ID NOs: 1587-1627 and 1747. In some embodiments, the polypeptide comprises an amino acid sequence selected from SEQ ID NOs: 1747-1840 and 1859-1862.

[0100] In some embodiments, an ε-amino group of a lysine residue at position 21, position 24, position 28, or position 31 of the polypeptide is covalently linked to a C-terminus of the linker polypeptide.

[0101] Still another aspect of the disclosure provides a molecule comprising: a polypeptide that agonizes a glucagon receptor (“GCGR”); a linker polypeptide; and an antibody that specifically binds to a glucose-dependent insulinotropic polypeptide receptor (“GIPR”), wherein:
[0102] a C-terminus/C-terminal amino acid residue of the polypeptide is covalently linked to an N-terminus/N-terminal amino acid residue of the linker polypeptide; and
[0103] a C-terminus/C-terminal amino acid residue of the linker polypeptide is conjugated to a cysteine residue of the antibody.

[0104] In some embodiments, the C-terminal amino acid residue of the linker polypeptide is a lysine residue.

[0105] In some embodiments, the polypeptide is glucagon or a glucagon analog. In some embodiments, the polypeptide is glucagon. In some embodiments, the polypeptide is human glucagon. In some embodiments, the polypeptide is a glucagon analog. In some embodiments, the polypeptide is a human glucagon analog.

[0106] In some embodiments, the polypeptide comprises an amino acid sequence selected from SEQ ID NOs: 1587-1627, 1747-1840, and 1859-1862. In some embodiments, the polypeptide comprises an amino acid sequence selected from SEQ ID NOs: 1587-1627 and 1747. In some embodiments, the polypeptide comprises an amino acid sequence selected from SEQ ID NOs: 1747-1840 and 1859-1862.

[0107] Another aspect of the disclosure provides a molecule comprising:
[0108] a polypeptide that agonizes a glucagon receptor (“GCGR”) comprising the amino acid sequence of any one of SEQ ID NOs: 1587-1627, 1747-1749, 1751-1792, 1794-1798, 1801-1830, 1833-1840, 1859-1862, or 1879-1881;
[0109] a linker polypeptide comprising the amino acid sequence of any one of SEQ ID NOs: 1628-1683, 1739, 1850, or 1851, preferably SEQ ID NOs: 1628-1630, preferably SEQ ID NO: 1628 or SEQ ID NO: 1629; and
[0110] an antibody that specifically binds to a glucose-dependent insulinotropic polypeptide receptor (“GIPR”), wherein the antibody comprises a light chain and a heavy chain, wherein the light chain comprises the amino acid sequence of SEQ ID NO: 388 and the heavy chain comprises the amino acid sequence of SEQ ID NO: 1571,
[0111] wherein:
   [0112] an ε-amino group of a lysine residue at position 21, position 24, position 28, or position 31 of the polypeptide is covalently linked to a C-terminus of the linker polypeptide; and
   [0113] an N-terminus of the linker polypeptide is conjugated to a cysteine residue at position 275 of the heavy chain of the antibody.

[0114] In some embodiments, an ε-amino group of a lysine residue at position 24 or position 28 of the polypeptide is covalently linked to a C-terminus of the linker polypeptide.

[0115] Still another aspect of the disclosure provides a molecule comprising:
[0116] a polypeptide that agonizes a glucagon receptor (“GCGR”) comprising the amino acid sequence of any one of SEQ ID NOs: 1589, 1592, 1594, 1597, 1598, 1613, 1625, 1762, 1766-1768, 1787, 1788, 1797, 1798, 1804, 1805, 1811, 1812, 1821, 1822, 1833, 1837, or 1838;
[0117] a linker polypeptide comprising the amino acid sequence of any one of SEQ ID NOs: 1628-1683, 1739, 1850, or 1851; and
[0118] an antibody that specifically binds to a glucose-dependent insulinotropic polypeptide receptor (“GIPR”), wherein the antibody comprises a light chain and a heavy chain, wherein the light chain comprises the amino acid sequence of SEQ ID NO: 388 and the heavy chain comprises the amino acid sequence of SEQ ID NO: 1571,
[0119] wherein:
   [0120] an ε-amino group of a lysine residue at position 24 of the polypeptide is covalently linked to a C-terminus of the linker polypeptide; and
   [0121] an N-terminus of the linker polypeptide is conjugated to a cysteine residue at position 275 of the heavy chain of the antibody.

[0122] In some embodiments, the linker polypeptide comprises the amino acid sequence of any one of SEQ ID NOs: 1628-1630, 1632, 1634, 1641, 1642, 1644, or 1647.

[0123] Yet another aspect of the disclosure provides a molecule comprising:
[0124] a polypeptide that agonizes a glucagon receptor (“GCGR”) comprising the amino acid sequence of any one of SEQ ID NOs: 1587, 1588, 1590, 1591, 1593, 1595, 1596, 1599-1612, 1614-1624, 1626, 1627, 1747-1749, 1751-1761, 1763-1765, 1769-1786, 1790-1792, 1794-1796, 1801-1803, 1806-1810, 1813-1820, 1823-1830, 1834-1836, 1839, 1840, 1859, 1861, or 1862;
[0125] a linker polypeptide comprising the amino acid sequence of any one of SEQ ID NOs: 1628-1683, 1739, 1850, or 1851; and
[0126] an antibody that specifically binds to a glucose-dependent insulinotropic polypeptide receptor (“GIPR”), wherein the antibody comprises a light chain and a heavy chain, wherein the light chain comprises the amino acid sequence of SEQ ID NO: 388 and the heavy chain comprises the amino acid sequence of SEQ ID NO: 1571,
[0127] wherein:
   [0128] an ε-amino group of a lysine residue at position 28 of the polypeptide is covalently linked to a C-terminus of the linker polypeptide; and
   [0129] an N-terminus of the linker polypeptide is conjugated to a cysteine residue at position 275 of the heavy chain of the antibody.

[0130] In some embodiments, the linker polypeptide comprises the amino acid sequence of any one of SEQ ID NOs: 1628-1632, 1635, 1638-1640, 1642, 1644, 1647, 1850, or 1851. In some embodiments, the linker polypeptide comprises the amino acid sequence of any one of SEQ ID NOs: 1628-1632, 1635, 1638-1640, 1642, 1644, or 1647.

[0131] Still another aspect of the disclosure provides a molecule comprising:
[0132] a polypeptide that agonizes a glucagon receptor (“GCGR”) comprising the amino acid sequence of any one of SEQ ID NOs: 1587-1627 (e.g., SEQ ID NOs: 1587, 1592, 1596, 1615, or 1626);
[0133] a linker polypeptide comprising the amino acid sequence of any one of SEQ ID NOs: 1628-1683 (e.g., SEQ ID NOs: 1628-1630); and
[0134] an antibody that specifically binds to a glucose-dependent insulinotropic polypeptide receptor (“GIPR”), wherein the antibody comprises a light chain and a heavy chain, wherein the light chain comprises the amino acid sequence of SEQ ID NO: 388 and the heavy chain comprises the amino acid sequence of SEQ ID NO: 1571,
[0135] wherein:
   [0136] an ε-amino group of a lysine residue at position 24 or position 28 of the polypeptide is covalently linked to a C-terminus of the linker polypeptide; and
   [0137] an N-terminus of the linker polypeptide is conjugated to a cysteine residue at position 275 of the heavy chain of the antibody.

[0138] Another aspect of the disclosure provides a molecule comprising: a first polypeptide that agonizes a glucagon receptor (“GCGR”); a first linker polypeptide; an antibody that specifically binds to a glucose-dependent insulinotropic polypeptide receptor (“GIPR”); a second linker polypeptide; and a second polypeptide that agonizes a GCGR, wherein:
[0139] a C-terminus/C-terminal amino acid residue of the first polypeptide is covalently linked to an N-terminus/N-terminal amino acid residue of the first linker polypeptide;
[0140] a C-terminus/C-terminal amino acid residue of the first linker polypeptide is conjugated to a cysteine residue of the antibody;
[0141] a C-terminus/C-terminal amino acid residue of the second polypeptide is covalently linked to an N-terminus/N-terminal amino acid residue of the second linker polypeptide; and
[0142] a C-terminus/C-terminal amino acid residue of the second linker polypeptide is conjugated to a cysteine residue of the antibody.

[0143] Yet another aspect of the disclosure provides a molecule comprising: a first polypeptide that agonizes a glucagon receptor (“GCGR”); a first linker polypeptide; an antibody that specifically binds to a glucose-dependent insulinotropic polypeptide receptor (“GIPR”); a second linker polypeptide; and a second polypeptide that agonizes a GCGR,
[0144] wherein:
   [0145] an ε-amino group of a lysine residue of the first polypeptide is covalently linked to a C-terminus of the first linker polypeptide;
[0146] an N-terminus of the first linker polypeptide is conjugated to a cysteine residue of the antibody;
[0147] an ε-amino group of a lysine residue of the second polypeptide is covalently linked to a C-terminus of the second linker polypeptide; and
[0148] an N-terminus of the second linker polypeptide is conjugated to a cysteine residue of the antibody.

[0149] Still another aspect of the disclosure provides a molecule comprising:
[0150] a polypeptide that agonizes a glucagon receptor (“GCGR”) comprising the amino acid sequence of SEQ ID NO: 1615;
[0151] a linker polypeptide comprising the amino acid sequence of SEQ ID NO: 1629; and
[0152] an antibody that specifically binds to a glucose-dependent insulinotropic polypeptide receptor (“GIPR”), wherein the antibody comprises a light chain and a heavy chain, wherein the light chain comprises the amino acid sequence of SEQ ID NO: 388 and the heavy chain comprises the amino acid sequence of SEQ ID NO: 1571,
[0153] wherein:
   [0154] an ε-amino group of a lysine residue at position 28 of the polypeptide is covalently linked to a C-terminus of the linker polypeptide; and
   [0155] an N-terminus of the linker polypeptide is conjugated to a cysteine residue at position 275 of the heavy chain of the antibody.

[0156] Yet another aspect of the disclosure provides a molecule comprising:
[0157] a polypeptide that agonizes a glucagon receptor (“GCGR”) comprising the amino acid sequence of SEQ ID NO: 1626;
[0158] a linker polypeptide comprising the amino acid sequence of SEQ ID NO: 1628; and
[0159] an antibody that specifically binds to a glucose-dependent insulinotropic polypeptide receptor (“GIPR”), wherein the antibody comprises a light chain and a heavy chain, wherein the light chain comprises the amino acid sequence of SEQ ID NO: 388 and the heavy chain comprises the amino acid sequence of SEQ ID NO: 1571,
[0160] wherein:
   [0161] an ε-amino group of a lysine residue at position 28 of the polypeptide is covalently linked to a C-terminus of the linker polypeptide; and
   [0162] an N-terminus of the linker polypeptide is conjugated to a cysteine residue at position 275 of the heavy chain of the antibody.

[0163] Still another aspect of the disclosure provides a molecule comprising:
[0164] a polypeptide that agonizes a glucagon receptor (“GCGR”) comprising the amino acid sequence of SEQ ID NO: 1592;
[0165] a linker polypeptide comprising the amino acid sequence of SEQ ID NO: 1628; and
[0166] an antibody that specifically binds to a glucose-dependent insulinotropic polypeptide receptor (“GIPR”), wherein the antibody comprises a light chain and a heavy chain, wherein the light chain comprises the amino acid sequence of SEQ ID NO: 388 and the heavy chain comprises the amino acid sequence of SEQ ID NO: 1571,
[0167] wherein:
   [0168] an ε-amino group of a lysine residue at position 24 of the polypeptide is covalently linked to a C-terminus of the linker polypeptide; and
   [0169] an N-terminus of the linker polypeptide is conjugated to a cysteine residue at position 275 of the heavy chain of the antibody.

[0170] Yet another aspect of the disclosure provides a molecule comprising:
[0171] a polypeptide that agonizes a glucagon receptor (“GCGR”) comprising the amino acid sequence of SEQ ID NO: 1626;
[0172] a linker polypeptide comprising the amino acid sequence of SEQ ID NO: 1629; and
[0173] an antibody that specifically binds to a glucose-dependent insulinotropic polypeptide receptor (“GIPR”), wherein the antibody comprises a light chain and a heavy chain, wherein the light chain comprises the amino acid sequence of SEQ ID NO: 388 and the heavy chain comprises the amino acid sequence of SEQ ID NO: 1571,
[0174] wherein:
   [0175] an ε-amino group of a lysine residue at position 28 of the polypeptide is covalently linked to a C-terminus of the linker polypeptide; and
   [0176] an N-terminus of the linker polypeptide is conjugated to a cysteine residue at position 275 of the heavy chain of the antibody.

[0177] Still another aspect of the disclosure provides a molecule comprising:
[0178] a polypeptide that agonizes a glucagon receptor (“GCGR”) comprising the amino acid sequence of SEQ ID NO: 1587;
[0179] a linker polypeptide comprising the amino acid sequence of SEQ ID NO: 1628; and
[0180] an antibody that specifically binds to a glucose-dependent insulinotropic polypeptide receptor (“GIPR”), wherein the antibody comprises a light chain and a heavy chain, wherein the light chain comprises the amino acid sequence of SEQ ID NO: 388 and the heavy chain comprises the amino acid sequence of SEQ ID NO: 1571,
[0181] wherein:
   [0182] an ε-amino group of a lysine residue at position 28 of the polypeptide is covalently linked to a C-terminus of the linker polypeptide; and
   [0183] an N-terminus of the linker polypeptide is conjugated to a cysteine residue at position 275 of the heavy chain of the antibody.

[0184] Yet another aspect of the disclosure provides a molecule comprising:
[0185] a polypeptide that agonizes a glucagon receptor (“GCGR”) comprising the amino acid sequence of SEQ ID NO: 1587;
[0186] a linker polypeptide comprising the amino acid sequence of SEQ ID NO: 1630; and
[0187] an antibody that specifically binds to a glucose-dependent insulinotropic polypeptide receptor (“GIPR”), wherein the antibody comprises a light chain and a heavy chain, wherein the light chain comprises the amino acid sequence of SEQ ID NO: 388 and the heavy chain comprises the amino acid sequence of SEQ ID NO: 1571,
[0188] wherein:
   [0189] an ε-amino group of a lysine residue at position 28 of the polypeptide is covalently linked to a C-terminus of the linker polypeptide; and
   [0190] an N-terminus of the linker polypeptide is conjugated to a cysteine residue at position 275 of the heavy chain of the antibody.

[0191] Another aspect of the disclosure provides a molecule comprising:
[0192] a polypeptide that agonizes a glucagon receptor (“GCGR”) comprising the amino acid sequence of SEQ ID NO: 1822;
[0193] a linker polypeptide comprising the amino acid sequence of SEQ ID NO: 1628; and
[0194] an antibody that specifically binds to a glucose-dependent insulinotropic polypeptide receptor (“GIPR”), wherein the antibody comprises a light chain and a heavy chain, wherein the light chain comprises the amino acid sequence of SEQ ID NO: 388 and the heavy chain comprises the amino acid sequence of SEQ ID NO: 1571,
[0195] wherein:
   [0196] an ε-amino group of a lysine residue at position 24 of the polypeptide is covalently linked to a C-terminus of the linker polypeptide; and
   [0197] an N-terminus of the linker polypeptide is conjugated to a cysteine residue at position 275 of the heavy chain of the antibody.

[0198] Still another aspect of the disclosure provides a molecule comprising:
[0199] a polypeptide that agonizes a glucagon receptor (“GCGR”) comprising the amino acid sequence of SEQ ID NO: 1825;
[0200] a linker polypeptide comprising the amino acid sequence of SEQ ID NO: 1628; and
[0201] an antibody that specifically binds to a glucose-dependent insulinotropic polypeptide receptor (“GIPR”), wherein the antibody comprises a light chain and a heavy chain, wherein the light chain comprises the amino acid sequence of SEQ ID NO: 388 and the heavy chain comprises the amino acid sequence of SEQ ID NO: 1571,
[0202] wherein:
   [0203] an ε-amino group of a lysine residue at position 28 of the polypeptide is covalently linked to a C-terminus of the linker polypeptide; and
   [0204] an N-terminus of the linker polypeptide is conjugated to a cysteine residue at position 275 of the heavy chain of the antibody.

[0205] Yet another aspect of the disclosure provides a molecule comprising:
[0206] a polypeptide that agonizes a glucagon receptor (“GCGR”) comprising the amino acid sequence of SEQ ID NO: 1826;
[0207] a linker polypeptide comprising the amino acid sequence of SEQ ID NO: 1628; and
[0208] an antibody that specifically binds to a glucose-dependent insulinotropic polypeptide receptor (“GIPR”), wherein the antibody comprises a light chain and a heavy chain, wherein the light chain comprises the amino acid sequence of SEQ ID NO: 388 and the heavy chain comprises the amino acid sequence of SEQ ID NO: 1571,
[0209] wherein:
   [0210] an ε-amino group of a lysine residue at position 28 of the polypeptide is covalently linked to a C-terminus of the linker polypeptide; and
   [0211] an N-terminus of the linker polypeptide is conjugated to a cysteine residue at position 275 of the heavy chain of the antibody.

[0212] Still another aspect of the disclosure provides a molecule comprising:
[0213] a polypeptide that agonizes a glucagon receptor (“GCGR”) comprising the amino acid sequence of SEQ ID NO: 1818;
[0214] a linker polypeptide comprising the amino acid sequence of SEQ ID NO: 1628; and
[0215] an antibody that specifically binds to a glucose-dependent insulinotropic polypeptide receptor (“GIPR”), wherein the antibody comprises a light chain and a heavy chain, wherein the light chain comprises the amino acid sequence of SEQ ID NO: 388 and the heavy chain comprises the amino acid sequence of SEQ ID NO: 1571,
[0216] wherein:
   [0217] an ε-amino group of a lysine residue at position 28 of the polypeptide is covalently linked to a C-terminus of the linker polypeptide; and
   [0218] an N-terminus of the linker polypeptide is conjugated to a cysteine residue at position 275 of the heavy chain of the antibody.

[0219] Another aspect of the disclosure provides a molecule comprising:
[0220] a first polypeptide and a second polypeptide that agonize a glucagon receptor (“GCGR”), wherein each of the first polypeptide and the second polypeptide comprises an amino acid sequence independently selected from SEQ ID NOs: 1587-1627, 1747-1749, 1751-1792, 1794-1798, 1801-1830, 1833-1840, and 1859-1862;
[0221] a first linker polypeptide and a second linker polypeptide, wherein each of the first linker polypeptide and the second linker polypeptide comprises an amino acid sequence selected from SEQ ID NOs: 1628-1683, 1739-1746, and 1841-1852; and
[0222] an antibody that specifically binds to a glucose-dependent insulinotropic polypeptide receptor (“GIPR”), wherein the antibody comprises a first light chain and a second light chain, wherein the first light chain and the second light chain each comprise the amino acid sequence of SEQ ID NO: 388, and a first heavy chain and a second heavy chain, wherein the first heavy chain and the second heavy chain each comprise the amino acid sequence of SEQ ID NO: 1571,
[0223] wherein:
   [0224] an ε-amino group of a lysine residue at position 21, position 24, position 28, or position 31 of the first polypeptide is covalently linked to a C-terminus of the first linker polypeptide;
   [0225] an N-terminus of the first linker polypeptide is conjugated to a cysteine residue at position 275 of the first heavy chain of the antibody;
   [0226] an ε-amino group of a lysine residue at position 21, position 24, position 28, or position 31 of the second polypeptide is covalently linked to a C-terminus of the second linker polypeptide; and
   [0227] an N-terminus of the second linker polypeptide is conjugated to a cysteine residue at position 275 of the second heavy chain of the antibody.

[0228] In some embodiments, the first polypeptide and the second polypeptide each comprise an amino acid sequence independently selected from SEQ ID NOs: 1589, 1592, 1594, 1597, 1598, 1613, 1625, 1762, 1766-1768, 1787, 1788, 1797, 1798, 1804, 1805, 1811, 1812, 1821, 1822, 1833, 1837, and 1838, the ε-amino group of the lysine residue at position 24 of the first polypeptide is covalently linked to the C-terminus of the first linker polypeptide, and the ε-amino group of the lysine residue at position 24 of the second polypeptide is covalently linked to the C-terminus of the second linker polypeptide. In some embodiments, the first polypeptide and the second polypeptide have identical amino acid sequences. In some embodiments, the first linker polypeptide and the second linker polypeptide have identical amino acid sequences. In some embodiments, the first polypeptide and the second polypeptide have identical amino acid sequences, and the first linker polypeptide and the second linker polypeptide have identical amino acid sequences.

[0229] In some embodiments, the first polypeptide and the second polypeptide comprise an amino acid sequence independently selected from SEQ ID NOs: 1587, 1588, 1590, 1591, 1593, 1595, 1596, 1599-1612, 1614-1624, 1626, 1627, 1747-1749, 1751-1761, 1763-1765, 1769-1786, 1790-1792, 1794-1796, 1801-1803, 1806-1810, 1813-1820, 1823-1830, 1834-1836, 1839, 1840, 1859, 1861, and 1862, the ε-amino group of the lysine residue at position 28 of the first polypeptide is covalently linked to the C-terminus of the first linker polypeptide, and the ε-amino group of the lysine residue at position 28 of the second polypeptide is covalently linked to the C-terminus of the second linker polypeptide. In some embodiments, the first polypeptide and the second polypeptide have identical amino acid sequences. In some embodiments, the first linker polypeptide and the second linker polypeptide have identical amino acid sequences. In some embodiments, the first polypeptide and the second polypeptide have identical amino acid sequences, and the first linker polypeptide and the second linker polypeptide have identical amino acid sequences.

[0230] In some embodiments, the first polypeptide and the second polypeptide each comprise an amino acid sequence of SEQ ID NO: 1860, the ε-amino group of the lysine residue at position 21 of the first polypeptide is covalently linked to the C-terminus of the first linker polypeptide, and the ε-amino group of the lysine residue at position 21 of the second polypeptide is covalently linked to the C-terminus of the second linker polypeptide. In some embodiments, the first linker polypeptide and the second linker polypeptide have identical amino acid sequences.

[0231] In some embodiments, the first polypeptide and the second polypeptide each comprise an amino acid sequence of SEQ ID NO: 1789, the ε-amino group of the lysine residue at position 31 of the first polypeptide is covalently linked to the C-terminus of the first linker polypeptide, and the ε-amino group of the lysine residue at position 31 of the second polypeptide is covalently linked to the C-terminus of the second linker polypeptide. In some embodiments, the first linker polypeptide and the second linker polypeptide have identical amino acid sequences.

[0232] Still another aspect of the disclosure provides a molecule comprising:
[0233] a first polypeptide and a second polypeptide that agonize a glucagon receptor (“GCGR”), wherein each of the first polypeptide and the second polypeptide comprise an amino acid sequence independently selected from SEQ ID NOs: 1587-1627 (e.g., SEQ ID NOs: 1587, 1592, 1596, 1615, or 1626);
[0234] a first linker polypeptide and a second linker polypeptide, wherein each of the first linker polypeptide and the second linker polypeptide comprise an amino acid sequence selected from SEQ ID NOs: 1628-1683 (e.g., SEQ ID NOs: 1628-1630); and
[0235] an antibody that specifically binds to a glucose-dependent insulinotropic polypeptide receptor (“GIPR”), wherein the antibody comprises a first light chain and a second light chain, wherein the first light chain and the second light chain each comprise the amino acid sequence of SEQ ID NO: 388, and a first heavy chain and a second heavy chain, wherein the first heavy chain and the second heavy chain each comprise the amino acid sequence of SEQ ID NO: 1571,
[0236] wherein:
   [0237] an ε-amino group of a lysine residue at position 24 or position 28 of the first polypeptide is covalently linked to a C-terminus of the first linker polypeptide; an N-terminus of the first linker polypeptide is conjugated to a cysteine residue at position 275 of the first heavy chain of the antibody;
   [0238] an ε-amino group of a lysine residue at position 24 or position 28 of the second polypeptide is covalently linked to a C-terminus of the second linker polypeptide; and
   [0239] an N-terminus of the second linker polypeptide is conjugated to a cysteine residue at position 275 of the second heavy chain of the antibody.

[0240] In some embodiments, the first polypeptide and the second polypeptide have identical amino acid sequences. In some embodiments, the first linker polypeptide and the second linker polypeptide have identical amino acid sequences. In some embodiments, the first polypeptide and the second polypeptide have identical amino acid sequences, and the first linker polypeptide and the second linker polypeptide have identical amino acid sequences.

[0241] Another aspect of the disclosure provides a molecule comprising:
[0242] a first polypeptide and a second polypeptide that agonize a glucagon receptor (“GCGR”), wherein each of the first polypeptide and the second polypeptide comprise an amino acid sequence independently selected from SEQ ID NOs: 1587-1627, 1747-1840, and 1859-1862;
[0243] a first linker polypeptide and a second linker polypeptide, wherein each of the first linker polypeptide and the second linker polypeptide comprise an amino acid sequence selected from SEQ ID NOs: 1628-1683, 1739-1746, and 1841-1852; and
[0244] an antibody that specifically binds to a glucose-dependent insulinotropic polypeptide receptor (“GIPR”), wherein the antibody comprises a first light chain and a second light chain, wherein the first light chain and the second light chain each comprise the amino acid sequence of SEQ ID NO: 388, and a first heavy chain and a second heavy chain, wherein the first heavy chain and the second heavy chain each comprise the amino acid sequence of SEQ ID NO: 1571,
[0245] wherein:
   [0246] a C-terminus/C-terminal amino acid residue of the first polypeptide is covalently linked to an N-terminus/N-terminal amino acid residue of the first linker polypeptide;
   [0247] a C-terminus/C-terminal amino acid residue of the first linker polypeptide is conjugated to a cysteine residue at position 275 of the first heavy chain of the antibody;
   [0248] a C-terminus/C-terminal amino acid residue of the second polypeptide is covalently linked to an N-terminus/N-terminal amino acid residue of the second linker polypeptide; and
   [0249] a C-terminus/C-terminal amino acid residue of the second linker polypeptide is conjugated to a cysteine residue at position 275 of the second heavy chain of the antibody.

[0250] In some embodiments, each of the first polypeptide and the second polypeptide comprise an amino acid sequence independently selected from SEQ ID NOs: 1793, 1799, 1800, 1831, and 1832. In some embodiments, each of the first linker polypeptide and the second linker polypeptide comprise an amino acid sequence independently selected from SEQ ID NOs: 1740-1746, 1841-1849, or 1852. In some embodiments, each of the first polypeptide and the second polypeptide comprise an amino acid sequence independently selected from SEQ ID NOs: 1793, 1799, 1800, 1831, and 1832, and each of the first linker polypeptide and the second linker polypeptide comprise an amino acid sequence independently selected from SEQ ID NOs: 1740-1746, 1841-1849, or 1852.

[0251] In some embodiments, the first polypeptide and the second polypeptide have identical amino acid sequences. In some embodiments, the first linker polypeptide and the second linker polypeptide have identical amino acid sequences. In some embodiments, the first polypeptide and the second polypeptide have identical amino acid sequences, and the first linker polypeptide and the second linker polypeptide have identical amino acid sequences.

[0252] Yet another aspect of the disclosure provides a molecule comprising:
[0253] a first polypeptide and a second polypeptide that agonize a glucagon receptor (“GCGR”), wherein the first polypeptide and the second polypeptide each comprise the amino acid sequence of SEQ ID NO: 1615;
[0254] a first linker polypeptide and a second linker polypeptide, wherein the first linker polypeptide and the second linker polypeptide each comprise the amino acid sequence of SEQ ID NO: 1629; and
[0255] an antibody that specifically binds to a glucose-dependent insulinotropic polypeptide receptor (“GIPR”), wherein the antibody comprises a first light chain and a second light chain, wherein the first light chain and the second light chain each comprise the amino acid sequence of SEQ ID NO: 388, and a first heavy chain and a second heavy chain, wherein the first heavy chain and the second heavy chain each comprise the amino acid sequence of SEQ ID NO: 1571,
[0256] wherein:
   [0257] an ε-amino group of a lysine residue at position 28 of the first polypeptide is covalently linked to a C-terminus of the first linker polypeptide; an N-terminus of the first linker polypeptide is conjugated to a cysteine residue at position 275 of the first heavy chain of the antibody;
   [0258] an ε-amino group of a lysine residue at position 28 of the second polypeptide is covalently linked to a C-terminus of the second linker polypeptide; and
   [0259] an N-terminus of the second linker polypeptide is conjugated to a cysteine residue at position 275 of the second heavy chain of the antibody.

[0260] Still another aspect of the disclosure provides a molecule comprising: a first polypeptide and a second polypeptide that agonize a glucagon receptor (“GCGR”), wherein the first polypeptide and the second polypeptide each comprise the amino acid sequence of SEQ ID NO: 1626;
[0261] a first linker polypeptide and a second linker polypeptide, wherein the first linker polypeptide and the second linker polypeptide each comprise the amino acid sequence of SEQ ID NO: 1628; and
[0262] an antibody that specifically binds to a glucose-dependent insulinotropic polypeptide receptor (“GIPR”), wherein the antibody comprises a first light chain and a second light chain, wherein the first light chain and the second light chain each comprise the amino acid sequence of SEQ ID NO: 388, and a first heavy chain and a second heavy chain, wherein the first heavy chain and the second heavy chain each comprise the amino acid sequence of SEQ ID NO: 1571,
[0263] wherein:
   [0264] an ε-amino group of a lysine residue at position 28 of the first polypeptide is covalently linked to a C-terminus of the first linker polypeptide;
   [0265] an N-terminus of the first linker polypeptide is conjugated to a cysteine residue at position 275 of the first heavy chain of the antibody;
   [0266] an ε-amino group of a lysine residue at position 28 of the second polypeptide is covalently linked to a C-terminus of the second linker polypeptide; and
   [0267] an N-terminus of the second linker polypeptide is conjugated to a cysteine residue at position 275 of the second heavy chain of the antibody.

[0268] Yet another aspect of the disclosure provides a molecule comprising: a first polypeptide and a second polypeptide that agonize a glucagon receptor (“GCGR”), wherein the first polypeptide and the second polypeptide each comprise the amino acid sequence of SEQ ID NO: 1592;
[0269] a first linker polypeptide and a second linker polypeptide, wherein the first linker polypeptide and the second linker polypeptide each comprise the amino acid sequence of SEQ ID NO: 1628; and
[0270] an antibody that specifically binds to a glucose-dependent insulinotropic polypeptide receptor (“GIPR”), wherein the antibody comprises a first light chain and a second light chain, wherein the first light chain and the second light chain each comprise the amino acid sequence of SEQ ID NO: 388, and a first heavy chain and a second heavy chain, wherein the first heavy chain and the second heavy chain each comprise the amino acid sequence of SEQ ID NO: 1571,
[0271] wherein:
   [0272] an ε-amino group of a lysine residue at position 24 of the first polypeptide is covalently linked to a C-terminus of the first linker polypeptide;
   [0273] an N-terminus of the first linker polypeptide is conjugated to a cysteine residue at position 275 of the first heavy chain of the antibody;
   [0274] an ε-amino group of a lysine residue at position 24 of the second polypeptide is covalently linked to a C-terminus of the second linker polypeptide; and
   [0275] an N-terminus of the second linker polypeptide is conjugated to a cysteine residue at position 275 of the second heavy chain of the antibody.

[0276] Still another aspect of the disclosure provides a molecule comprising:
[0277] a first polypeptide and a second polypeptide that agonize a glucagon receptor (“GCGR”), wherein the first polypeptide and the second polypeptide each comprise the amino acid sequence of SEQ ID NO: 1626;
[0278] a first linker polypeptide and a second linker polypeptide, wherein the first linker polypeptide and the second linker polypeptide each comprise the amino acid sequence of SEQ ID NO: 1629; and
[0279] an antibody that specifically binds to a glucose-dependent insulinotropic polypeptide receptor (“GIPR”), wherein the antibody comprises a first light chain and a second light chain, wherein the first light chain and the second light chain each comprise the amino acid sequence of SEQ ID NO: 388, and a first heavy chain and a second heavy chain, wherein the first heavy chain and the second heavy chain each comprise the amino acid sequence of SEQ ID NO: 1571,
[0280] wherein:
   [0281] an ε-amino group of a lysine residue at position 28 of the first polypeptide is covalently linked to a C-terminus of the first linker polypeptide; an N-terminus of the first linker polypeptide is conjugated to a cysteine residue at position 275 of the first heavy chain of the antibody;
[0282] an ε-amino group of a lysine residue at position 28 of the second polypeptide is covalently linked to a C-terminus of the second linker polypeptide; and
   [0283] an N-terminus of the second linker polypeptide is conjugated to a cysteine residue at position 275 of the second heavy chain of the antibody.

[0284] Yet another aspect of the disclosure provides a molecule comprising:
[0285] a first polypeptide and a second polypeptide that agonize a glucagon receptor (“GCGR”), wherein the first polypeptide and the second polypeptide each comprise the amino acid sequence of SEQ ID NO: 1587;
[0286] a first linker polypeptide and a second linker polypeptide, wherein the first linker polypeptide and the second linker polypeptide each comprise the amino acid sequence of SEQ ID NO: 1628; and
[0287] an antibody that specifically binds to a glucose-dependent insulinotropic polypeptide receptor (“GIPR”), wherein the antibody comprises a first light chain and a second light chain, wherein the first light chain and the second light chain each comprise the amino acid sequence of SEQ ID NO: 388, and a first heavy chain and a second heavy chain, wherein the first heavy chain and the second heavy chain each comprise the amino acid sequence of SEQ ID NO: 1571,
[0288] wherein:
   [0289] an ε-amino group of a lysine residue at position 28 of the first polypeptide is covalently linked to a C-terminus of the first linker polypeptide; an N-terminus of the first linker polypeptide is conjugated to a cysteine residue at position 275 of the first heavy chain of the antibody;
   [0290] an ε-amino group of a lysine residue at position 28 of the second polypeptide is covalently linked to a C-terminus of the second linker polypeptide; and
   [0291] an N-terminus of the second linker polypeptide is conjugated to a cysteine residue at position 275 of the second heavy chain of the antibody.

[0292] Still another aspect of the disclosure provides a molecule comprising:
[0293] a first polypeptide and a second polypeptide that agonize a glucagon receptor (“GCGR”), wherein the first polypeptide and the second polypeptide each comprise the amino acid sequence of SEQ ID NO: 1587;
[0294] a first linker polypeptide and a second linker polypeptide, wherein the first linker polypeptide and the second linker polypeptide each comprise the amino acid sequence of SEQ ID NO: 1630; and
[0295] an antibody that specifically binds to a glucose-dependent insulinotropic polypeptide receptor (“GIPR”), wherein the antibody comprises a first light chain and a second light chain, wherein the first light chain and the second light chain each comprise the amino acid sequence of SEQ ID NO: 388, and a first heavy chain and a second heavy chain, wherein the first heavy chain and the second heavy chain each comprise the amino acid sequence of SEQ ID NO: 1571,
[0296] wherein:
   [0297] an ε-amino group of a lysine residue at position 28 of the first polypeptide is covalently linked to a C-terminus of the first linker polypeptide;
   [0298] an N-terminus of the first linker polypeptide is conjugated to a cysteine residue at position 275 of the first heavy chain of the antibody;
   [0299] an ε-amino group of a lysine residue at position 28 of the second polypeptide is covalently linked to a C-terminus of the second linker polypeptide; and
   [0300] an N-terminus of the second linker polypeptide is conjugated to a cysteine residue at position 275 of the second heavy chain of the antibody.

[0301] Another aspect of the disclosure provides a molecule comprising:
[0302] a first polypeptide and a second polypeptide that agonize a glucagon receptor (“GCGR”), wherein the first polypeptide and the second polypeptide each comprise the amino acid sequence of SEQ ID NO: 1822;
[0303] a first linker polypeptide and a second linker polypeptide, wherein the first linker polypeptide and the second linker polypeptide each comprise the amino acid sequence of SEQ ID NO: 1628; and
[0304] an antibody that specifically binds to a glucose-dependent insulinotropic polypeptide receptor (“GIPR”), wherein the antibody comprises a first light chain and a second light chain, wherein the first light chain and the second light chain each comprise the amino acid sequence of SEQ ID NO: 388, and a first heavy chain and a second heavy chain, wherein the first heavy chain and the second heavy chain each comprise the amino acid sequence of SEQ ID NO: 1571,
[0305] wherein:
   [0306] an ε-amino group of a lysine residue at position 24 of the first polypeptide is covalently linked to a C-terminus of the first linker polypeptide;
   [0307] an N-terminus of the first linker polypeptide is conjugated to a cysteine residue at position 275 of the first heavy chain of the antibody;
   [0308] an ε-amino group of a lysine residue at position 24 of the second polypeptide is covalently linked to a C-terminus of the second linker polypeptide; and
   [0309] an N-terminus of the second linker polypeptide is conjugated to a cysteine residue at position 275 of the second heavy chain of the antibody.

[0310] Still another aspect of the disclosure provides a molecule comprising:
[0311] a first polypeptide and a second polypeptide that agonize a glucagon receptor (“GCGR”), wherein the first polypeptide and the second polypeptide each comprise the amino acid sequence of SEQ ID NO: 1825;
[0312] a first linker polypeptide and a second linker polypeptide, wherein the first linker polypeptide and the second linker polypeptide each comprise the amino acid sequence of SEQ ID NO: 1628; and
[0313] an antibody that specifically binds to a glucose-dependent insulinotropic polypeptide receptor (“GIPR”), wherein the antibody comprises a first light chain and a second light chain, wherein the first light chain and the second light chain each comprise the amino acid sequence of SEQ ID NO: 388, and a first heavy chain and a second heavy chain, wherein the first heavy chain and the second heavy chain each comprise the amino acid sequence of SEQ ID NO: 1571,
[0314] wherein:
   [0315] an ε-amino group of a lysine residue at position 28 of the first polypeptide is covalently linked to a C-terminus of the first linker polypeptide;
   [0316] an N-terminus of the first linker polypeptide is conjugated to a cysteine residue at position 275 of the first heavy chain of the antibody;
   [0317] an ε-amino group of a lysine residue at position 28 of the second polypeptide is covalently linked to a C-terminus of the second linker polypeptide; and
   [0318] an N-terminus of the second linker polypeptide is conjugated to a cysteine residue at position 275 of the second heavy chain of the antibody.

[0319] Yet another aspect of the disclosure provides a molecule comprising:
[0320] a first polypeptide and a second polypeptide that agonize a glucagon receptor (“GCGR”), wherein the first polypeptide and the second polypeptide each comprise the amino acid sequence of SEQ ID NO: 1826;
[0321] a first linker polypeptide and a second linker polypeptide, wherein the first linker polypeptide and the second linker polypeptide each comprise the amino acid sequence of SEQ ID NO: 1628; and
[0322] an antibody that specifically binds to a glucose-dependent insulinotropic polypeptide receptor (“GIPR”), wherein the antibody comprises a first light chain and a second light chain, wherein the first light chain and the second light chain each comprise the amino acid sequence of SEQ ID NO: 388, and a first heavy chain and a second heavy chain, wherein the first heavy chain and the second heavy chain each comprise the amino acid sequence of SEQ ID NO: 1571,
[0323] wherein:
   [0324] an ε-amino group of a lysine residue at position 28 of the first polypeptide is covalently linked to a C-terminus of the first linker polypeptide;
   [0325] an N-terminus of the first linker polypeptide is conjugated to a cysteine residue at position 275 of the first heavy chain of the antibody;
   [0326] an ε-amino group of a lysine residue at position 28 of the second polypeptide is covalently linked to a C-terminus of the second linker polypeptide; and
   [0327] an N-terminus of the second linker polypeptide is conjugated to a cysteine residue at position 275 of the second heavy chain of the antibody.

[0328] Another aspect of the disclosure provides a molecule comprising:
[0329] a first polypeptide and a second polypeptide that agonize a glucagon receptor (“GCGR”), wherein the first polypeptide and the second polypeptide each comprise the amino acid sequence of SEQ ID NO: 1818;
[0330] a first linker polypeptide and a second linker polypeptide, wherein the first linker polypeptide and the second linker polypeptide each comprise the amino acid sequence of SEQ ID NO: 1628; and
[0331] an antibody that specifically binds to a glucose-dependent insulinotropic polypeptide receptor (“GIPR”), wherein the antibody comprises a first light chain and a second light chain, wherein the first light chain and the second light chain each comprise the amino acid sequence of SEQ ID NO: 388, and a first heavy chain and a second heavy chain, wherein the first heavy chain and the second heavy chain each comprise the amino acid sequence of SEQ ID NO: 1571,
[0332] wherein:
   [0333] an ε-amino group of a lysine residue at position 28 of the first polypeptide is covalently linked to a C-terminus of the first linker polypeptide;
   [0334] an N-terminus of the first linker polypeptide is conjugated to a cysteine residue at position 275 of the first heavy chain of the antibody;
   [0335] an ε-amino group of a lysine residue at position 28 of the second polypeptide is covalently linked to a C-terminus of the second linker polypeptide; and
   [0336] an N-terminus of the second linker polypeptide is conjugated to a cysteine residue at position 275 of the second heavy chain of the antibody.

[0337] Yet another aspect of the disclosure provides a pharmaceutical composition comprising a polypeptide or molecule disclosed herein and a pharmaceutically acceptable excipient.

[0338] Still another aspect of the disclosure provides a method of treating obesity in a subject in need of treatment, the method comprising administering a polypeptide, molecule, or a pharmaceutical composition to the subject.

[0339] Another aspect of the disclosure provides a method of reducing body weight and/or food intake in a subject in need thereof (e.g., an overweight or obese subject), the method comprising administering a polypeptide, molecule, or a pharmaceutical composition to the subject.

[0340] Yet another aspect of the disclosure provides a polypeptide or molecule disclosed herein for use as a medicament. Another aspect of the disclosure provides a polypeptide or molecule disclosed herein, or a pharmaceutical composition disclosed herein, for use in the treatment of obesity. Still another aspect of the disclosure provides a polypeptide or molecule disclosed herein, or a pharmaceutical composition disclosed herein, for use in a method of reducing body weight and/or food intake in a subject in need thereof (e.g., an overweight or obese subject).

[0341] Yet another aspect of the disclosure provides a polypeptide or molecule disclosed herein for the manufacture of a medicament for the treatment of obesity. Another aspect of the disclosure provides a polypeptide or molecule disclosed herein for the manufacture of a medicament for reducing body weight and/or food intake in a subject in need thereof (e.g., an overweight or obese subject).

[0342] Another aspect of the disclosure provides a GCGR agonist and a GIPR antagonist for use in therapy. Yet another aspect of the disclosure provides a GCGR agonist for use in therapy in combination with a GIPR antagonist. Still another aspect provides a GIPR antagonist for use in therapy in combination with a GCGR agonist. In some embodiments, the therapy is for use in weight management. In some embodiments, the therapy is for use in treating obesity. In some cases, the GCGR agonist and the GIPR antagonist may be used in acute therapy. In other cases, the GCGR agonist and the GIPR antagonist may be used in chronic therapy. The GCGR agonist and the GIPR antagonist may be present in the same or separate pharmaceutical compositions.

[0343] Another aspect of the disclosure provides a use of a GCGR agonist and a GIPR antagonist in the preparation of a medicament. Yet another aspect of the disclosure provides a use of a GCGR agonist in the preparation of a medicament for use in combination therapy with a GIPR antagonist. Still another aspect of the disclosure provides a use of a GIPR antagonist in the preparation of a medicament for use in combination therapy with a GCGR agonist. In some embodiments, the medicament is for use in combination therapy for weight management. In some embodiments, the medicament is for use in combination therapy in treating obesity.

[0344] Another aspect of the disclosure provides a method of treating obesity in a subject in need thereof, the method comprising administering a glucagon receptor (GCGR) agonist and a GIPR antagonist to the subject. Still another aspect of the disclosure provides a method of reducing body weight and/or food intake in a subject in need thereof, the method comprising administering a glucagon receptor (GCGR) agonist and a GIPR antagonist to the subject.

[0345] Another aspect of the disclosure provides a GCGR agonist and a GIPR antagonist for use in treating obesity. Yet another aspect of the disclosure provides a GCGR agonist for use in treating obesity in combination with a GIPR antagonist. Still another aspect of the disclosure provides a GIPR antagonist for use in treating obesity in combination with a GCGR agonist.

[0346] Another aspect of the disclosure provides a GCGR agonist and a GIPR antagonist for use in reducing body weight and/or food intake in a subject in need thereof. Yet another aspect of the disclosure provides a GCGR agonist for use in reducing body weight and/or food intake in a subject in need thereof in combination with a GIPR antagonist. Still another aspect of the disclosure provides a GIPR antagonist for use in reducing body weight and/or food intake in a subject in need thereof in combination with a GCGR agonist.

[0347] Another aspect of the disclosure provides a use of a GCGR agonist and a GIPR antagonist in the manufacture of a medicament for treating obesity. Yet another aspect of the disclosure provides a use of a GCGR agonist in the manufacture of a medicament for treating obesity in combination with a GIPR antagonist. Still another aspect of the disclosure provides a use of a GIPR antagonist in the manufacture of a medicament for treating obesity in combination with a GCGR agonist.

[0348] Another aspect of the disclosure provides a use of a GCGR agonist and a GIPR antagonist in the manufacture of a medicament for reducing body weight and/or food intake in a subject in need thereof. Yet another aspect of the disclosure provides a use of a GCGR agonist in the manufacture of a medicament for reducing body weight and/or food intake in a subject in need thereof in combination with a GIPR antagonist. Still another aspect of the disclosure provides a use of a GIPR antagonist in the manufacture of a medicament for reducing body weight and/or food intake in a subject in need thereof in combination with a GCGR agonist.

[0349] Another aspect of the disclosure provides a combination therapy comprising a GLP-1 agonist (e.g., semaglutide) and a polypeptide or molecule disclosed herein for use in weight management. Still another aspect of the disclosure provides a combination therapy comprising a GLP-1 agonist (e.g., semaglutide) and a polypeptide or molecule disclosed herein for use in the treatment of obesity. Another aspect of the disclosure provides a combination therapy comprising a GLP-1 agonist (e.g., semaglutide) and a polypeptide or molecule disclosed herein for use in a method of reducing body weight and/or food intake in a subject in need thereof (e.g., an overweight or obese subject).

[0350] Further aspects and advantages will be apparent to those of ordinary skill in the art from a review of the following detailed description. The description hereafter includes specific cases, embodiments, and examples with the understanding that the disclosure is illustrative and is not intended to limit the embodiments of the present disclosure to the specific cases, embodiments, and examples described herein.

### BRIEF DESCRIPTION OF THE DRAWINGS

[0351] FIG. 1A depicts cAMP levels expressed as a fluorescence ratio of 665/620 nm in CHOK1 cells stably expressing human GCGR following exposure to six example GIPR×GCG conjugates and a positive control.

[0352] FIG. 1B depicts cAMP levels expressed as a fluorescence ratio of 665/620 nm in primary human hepatocytes expressing human GCGR following exposure to an example GIPR×GCG conjugate and a positive control.

[0353] FIG. 1C depicts cAMP levels expressed as a fluorescence ratio of 665/620 nm in primary mouse hepatocytes expressing mouse GCGR following exposure to an example GIPR×GCG conjugate and a positive control.

[0354] FIG. 2 shows cAMP levels expressed as a fluorescence ratio of 665/620 nm in CHOK1 cells stably expressing human GLP-1R following exposure to six example GIPR×GCG conjugates and a positive control.

[0355] FIG. 3A provides cAMP levels expressed as a fluorescence ratio of 665/620 nm in HEK 293T cells stably expressing human GIPR following exposure to six example GIPR×GCG conjugates and a positive control.

[0356] FIG. 3B provides cAMP levels expressed as a fluorescence ratio of 665/620 nm in CHO AMID cells expressing mouse GIPR following exposure to an example GIPR×GCG conjugate and a positive control.

[0357] FIGS. 4A-4D depict changes in body weight from baseline for mice with diet-induced obesity treated with either vehicle, a long-lasting GCG agonist (DNP×GCG conjugate), or a GIPR×GCG conjugate.

[0358] FIG. 5A shows changes in body weight from baseline for mice with diet-induced obesity treated with either vehicle, a long-lasting GCG agonist (DNP×GCG conjugate), or a GIPR×GCG conjugate.

[0359] FIGS. 5B and 5C show blood glucose levels 3 hours (FIG. 5B) or 24 and 72 hours (FIG. 5C), respectively, post-injection of vehicle, a long-lasting GCG agonist (DNP×GCG conjugate), or a GIPR×GCG conjugate in diet-induced obese mice.

[0360] FIG. 6A depicts changes in body weight from baseline for mice with diet-induced obesity treated with vehicle or one of six example GIPR×GCG conjugates.

[0361] FIG. 6B shows liver triglycerides in milligrams of triacylglycerol (TGA) per gram of liver tissue on day 14 of a study in which mice with diet-induced obesity were treated with vehicle or one of six example GIPR×GCG conjugates.

[0362] FIGS. 6C-6E provide liver tissue (FIG. 6C), inguinal white adipose tissue (FIG. 6D), and epididymal white adipose tissue (FIG. 6E) weights on day 14 of a study in which mice with diet-induced obesity were treated with vehicle or one of six example GIPR×GCG conjugates.

[0363] FIGS. 6F-6J depict plasma glucose (FIG. 6F), plasma insulin (FIG. 6G), plasma cholesterol (FIG. 6H), plasma low-density lipoprotein (LDL)-cholesterol (C) (FIG. 6I), and plasma triglyceride (FIG. 6J) levels on day 14 of a study in which mice with diet-induced obesity were treated with vehicle or one of six example GIPR×GCG conjugates.

[0364] FIGS. 7A and 7B show blood glucose levels over 90 minutes (FIG. 7A) and glucose area under the curve (AUC) (FIG. 7B) observed during an oral glucose tolerance test (OGTT) in diet-induced obese (DIO) mice pre-treated with vehicle or one of five example GIPR×GCG conjugates.

[0365] FIGS. 7C and 7D show plasma insulin levels over 90 minutes (FIG. 7C) and insulin area under the curve (AUC) (FIG. 7D) observed during OGTT in DIO mice pre-treated with vehicle or one of five example GIPR×GCG conjugates.

[0366] FIG. 8A depicts changes in body weight from baseline for DIO mice treated with vehicle, the GLP-1 agonist semaglutide, semaglutide followed by a GIPR×GCG conjugate, or semaglutide plus a GIPR×GCG conjugate over a 28-day study period.

[0367] FIG. 8B depicts daily food intake for DIO mice treated with vehicle, the GLP-1 agonist semaglutide, semaglutide followed by a GIPR×GCG conjugate, or semaglutide plus a GIPR×GCG conjugate over a 28-day study period.

[0368] FIGS. 8C-8G provide inguinal white adipose tissue (FIG. 8C), epididymal white adipose tissue (FIG. 8D), liver tissue (FIG. 8E), kidney tissue (paired) (FIG. 8F), and brain tissue (FIG. 8G) weights on day 28 of a study in which mice with diet-induced obesity were treated with vehicle, semaglutide, semaglutide followed by a GIPR×GCG conjugate, or semaglutide plus a GIPR×GCG conjugate.

[0369] FIGS. 8H-8M show plasma triglyceride (FIG. 8H), plasma cholesterol (FIG. 8I), plasma high-density lipoprotein (HDL)-cholesterol (C) (FIG. 8J), plasma LDL-C (FIG. 8K), plasma glucose (FIG. 8L), and plasma insulin levels (FIG. 8M) on day 28 of a study in which mice with diet-induced obesity were treated with vehicle, semaglutide, semaglutide followed by a GIPR×GCG conjugate, or semaglutide plus a GIPR×GCG conjugate.

[0370] FIG. 9 depicts the structure of a molecule provided herein. The molecule comprises a polypeptide agonist of GCGR (SEQ ID NO: 1871, which shares a linear peptide sequence with SEQ ID NO: 1587) covalently linked via an amide bond formed between an ε-amino group of a lysine residue at position 28 and the C-terminus of a polypeptide linker (SEQ ID NO: 1872, which shares a linear peptide sequence with SEQ ID NO: 1628), wherein the N-terminus of the polypeptide linker has been bromoacetylated to permit further conjugation to an anti-GIPR antibody via an alkylation reaction with a thiol group of a cysteine residue. For example, in GIPR×GCG conjugate 51671, two molecules with the structure depicted in FIG. 9 are covalently linked to an anti-GIPR antibody comprising two heavy chains, each comprising the amino acid sequence of SEQ ID NO: 1571, and two light chains, each comprising the amino acid sequence of SEQ ID NO: 388, wherein each molecule of FIG. 9 is covalently linked to the anti-GIPR antibody via a thiol-bromoacetyl reaction between the bromoacetylated N-terminus and a thiol group of a cysteine residue at position 275 of each heavy chain, which results in the formation of a thioether linkage that comprises a sulfur atom of the cysteine residue (one molecule per heavy chain).

[0371] FIG. 10 depicts the partial structure of a molecule provided herein comprising SEQ ID NOs: 1863 and 1864. The squiggly line represents a connection point between the partial structure and a sulfur atom of a cysteine residue of an anti-GIPR antibody described herein.

[0372] FIG. 11 depicts the structure of a molecule provided herein. The molecule comprises a polypeptide agonist of GCGR (SEQ ID NO: 1873, which shares a linear peptide sequence with SEQ ID NO: 1626) covalently linked via an amide bond formed between an ε-amino group of a lysine residue at position 28 and the C-terminus of a polypeptide linker (SEQ ID NO: 1874, which shares a linear peptide sequence with SEQ ID NO: 1629), wherein the N-terminus of the polypeptide linker has been bromoacetylated to permit further conjugation to an anti-GIPR antibody via a bromoacetyl-thiol reaction with a thiol group of a cysteine residue.

[0373] FIG. 12 depicts the partial structure of a molecule provided herein comprising SEQ ID NOs: 1865 and 1866. The squiggly line represents a connection point between the partial structure and a sulfur atom of a cysteine residue of an anti-GIPR antibody described herein.

[0374] FIG. 13 depicts the structure of a molecule provided herein. The molecule comprises a polypeptide agonist of GCGR (SEQ ID NO: 1875, which shares a linear peptide sequence with SEQ ID NO: 1626) covalently linked via an amide bond formed between an ε-amino group of a lysine residue at position 28 and the C-terminus of a polypeptide linker (SEQ ID NO: 1876, which shares a linear peptide sequence with SEQ ID NO: 1628), wherein the N-terminus of the polypeptide linker has been bromoacetylated to permit further conjugation to an anti-GIPR antibody via a bromoacetyl-thiol reaction with a thiol group of a cysteine residue.

[0375] FIG. 14 depicts the partial structure of a molecule provided herein comprising SEQ ID NOs: 1867 and 1868. The squiggly line represents a connection point between the partial structure and a sulfur atom of a cysteine residue of an anti-GIPR antibody described herein.

[0376] FIG. 15 depicts the structure of a molecule provided herein. The molecule comprises a polypeptide agonist of GCGR (SEQ ID NO: 1877, which shares a linear peptide sequence with SEQ ID NO: 1825) covalently linked via an amide bond formed between an ε-amino group of a lysine residue at position 28 and the C-terminus of a polypeptide linker (SEQ ID NO: 1878, which shares a linear peptide sequence with SEQ ID NO: 1628), wherein the N-terminus of the polypeptide linker has been bromoacetylated to permit further conjugation to an anti-GIPR antibody via a bromoacetyl-thiol reaction with a thiol group of a cysteine residue.

[0377] FIG. 16 depicts the partial structure of a molecule provided herein comprising SEQ ID NOs: 1869 and 1870. The squiggly line represents a connection point between the partial structure and a sulfur atom of a cysteine residue of an anti-GIPR antibody described herein.

### DETAILED DESCRIPTION

[0378] Disclosed herein are polypeptides having activity as agonists of a glucagon receptor, molecules comprising such polypeptides, pharmaceutical compositions comprising the polypeptides and molecules, and uses and methods in weight management and treating disorders, including obesity, with the polypeptides, molecules, and pharmaceutical compositions described herein.

### Definitions

[0379] The following definitions are provided to assist in understanding the scope of this disclosure. Unless defined otherwise, all technical and scientific terms used herein have the same meaning as is commonly understood by one of ordinary skill in the art to which this disclosure belongs.

[0380] As used herein, the terms “a” and “an” mean “one or more” unless specifically indicated otherwise. Additionally, “one or more” and “at least one” are used interchangeably herein. Furthermore, unless otherwise required by context, singular terms shall include pluralities, and plural terms shall include the singular.

[0381] Where a range of values is provided, it is understood that each intervening value, to the tenth of the unit of the lower limit unless the context clearly dictates otherwise, between the upper and lower limit of that range and any other stated or intervening value in that stated range is encompassed within the disclosure. The upper and lower limits of these smaller ranges may independently be included in the smaller ranges also encompassed within the disclosure, subject to any specifically excluded limit in the stated range. Unless otherwise required by context, numeric ranges are inclusive of the numbers defining the range (i.e., the endpoints). Where the stated range includes one or both of the limits, ranges excluding either or both of those included limits are also included in the disclosure.

[0382] Other than in the Examples, or where otherwise indicated, all numbers expressing quantities (e.g., of ingredients or reaction conditions) used herein should be understood as modified in all instances by the term “about.” As used herein, “about,” when used in connection with a measurable numerical variable, refers to the indicated value of the variable and to all values of the variable that are within the experimental error of the indicated value (e.g., within the 95% confidence interval for the mean) or +10% of the indicated value, whichever is greater.

[0383] Generally, nomenclatures used in connection with, and techniques of, cell and tissue culture, molecular biology, immunology, microbiology, genetics, and protein and nucleic acid chemistry and hybridization described herein are those well-known and commonly used in the art. For example, the methods and techniques of the present application (e.g., recombinant polypeptide and nucleic acid methods) are generally performed according to conventional methods well-known in the art and as described in various general and more specific references that are cited and discussed throughout the present specification unless otherwise indicated. See, e.g., Sambrook et al., Molecular Cloning: A Laboratory Manual, 3rd ed., Cold Spring Harbor Laboratory Press, Cold Spring Harbor, N.Y. (2001), Ausubel et al., Current Protocols in Molecular Biology, Greene Publishing Associates (1992), and Harlow and Lane Antibodies: A Laboratory Manual Cold Spring Harbor Laboratory Press, Cold Spring Harbor, N.Y. (1990), which are incorporated herein by reference. Illustratively, protein purification methods that can be employed to isolate a polypeptide, as well as associated materials and reagents, are known in the art, and additional purification methods that may be useful for isolating a polypeptide can be found in references such as Bootcov MR, 1997, Proc. Natl. Acad. Sci. USA 94:11514-9, Fairlie W D, 2000, Gene 254: 67-76. Enzymatic reactions and purification techniques are performed according to manufacturer's specifications, as commonly accomplished in the art or as described herein. The terminology used in connection with, and the laboratory procedures and techniques of, analytical chemistry, synthetic organic chemistry, and medicinal and pharmaceutical chemistry described herein are those well-known and commonly used in the art. Illustratively, standard techniques can be used for chemical syntheses, chemical analyses, pharmaceutical preparation, formulation, and delivery, and treatment of patients. It should be understood that the subject matter of this disclosure is not limited to the particular methodology, protocols, and reagents, etc., described herein and as such may vary.

[0384] The term “naturally occurring,” as used herein in connection with biological materials such as polypeptides, nucleic acids, host cells, and the like, refers to materials which are found in nature.

[0385] As used herein, a “recombinant protein” is a protein made using recombinant techniques, i.e., through the expression of a recombinant nucleic acid, as described herein. Methods and techniques for the production of recombinant proteins are well-known in the art.

[0386] As used herein, the terms “amino acid” and “residue” are used interchangeably and, when used in the context of a polypeptide, refer to both naturally occurring and synthetic amino acids, as well as amino acid analogs, amino acid mimetics, and non-naturally occurring amino acids that are chemically similar to the naturally occurring amino acids.

[0387] As used herein, a “naturally occurring amino acid” is an amino acid that is encoded by the genetic code, as well as those amino acids that are encoded by the genetic code that are modified after synthesis, such as, e.g., hydroxyproline, γ-carboxyglutamate, and O-phosphoserine. An amino acid analog is a compound that has the same basic chemical structure as a naturally occurring amino acid, i.e., an a carbon that is bound to a hydrogen, a carboxyl group, an amino group, and an R group, e.g., homoserine, norleucine, methionine sulfoxide, or methionine methyl sulfonium. Such analogs can have modified R groups (e.g., norleucine) or modified peptide backbones, but will retain the same basic chemical structure as a naturally occurring amino acid.

[0388] Naturally occurring residues can be divided into classes based on common side chain properties:
[0389] 1) hydrophobic: norleucine, Met, Ala, Val, Leu, Ile;
[0390] 2) neutral hydrophilic: Cys, Ser, Thr;
[0391] 3) acidic: Asp, Glu;
[0392] 4) basic: Asn, Gln, His, Lys, Arg;
[0393] 5) residues that influence chain orientation: Gly, Pro; and
[0394] 6) aromatic: Trp, Tyr, Phe.

[0395] Additional groups of amino acids can also be formulated using the principles described in, e.g., Creighton (1984) PROTEINS: STRUCTURE AND MOLECULAR PROPERTIES (2d Ed. 1993), W.H. Freeman and Company. In some instances, it can be useful to further characterize substitutions based on two or more of such features (e.g., substitution with a “small polar” residue, such as a Thr residue, can represent a highly conservative substitution in an appropriate context).

[0396] As used herein, a “conservative amino acid substitution” can involve a substitution of a native amino acid residue (i.e., a residue found in a given position of a reference polypeptide sequence) with a non-native residue (i.e., a residue that is not found in a given position of the reference sequence) such that there is little or no effect on the polarity or charge of the amino acid residue at that position. Conservative amino acid substitutions also encompass non-naturally occurring amino acid residues that are typically incorporated by chemical peptide synthesis rather than by synthesis in biological systems. These include peptidomimetics, and other reversed or inverted forms of amino acid moieties.

[0397] Conservative substitutions can involve the exchange of a member of one of these classes for another member of the same class. Non-conservative substitutions can involve the exchange of a member of one of these classes for a member from another class.

[0398] Synthetic, rare, or modified amino acid residues having known similar physiochemical properties to those of an above-described grouping can be used as a “conservative” substitute for a particular amino acid residue in a sequence. For example, a D-Arg residue may serve as a substitute for a typical L-Arg residue. It also can be the case that a particular substitution can be described in terms of two or more of the above described classes (e.g., a substitution with a small and hydrophobic residue means substituting one amino acid with a residue(s) that is found in both of the above-described classes or other synthetic, rare, or modified residues that are known in the art to have similar physiochemical properties to such residues meeting both definitions).

[0399] Conservative substitutions can be determined by considering the hydropathic index of amino acids. The hydropathic profile of a protein is calculated by assigning each amino acid a numerical value (“hydropathy index”) and then repetitively averaging these values along the peptide chain. Each amino acid has been assigned a hydropathic index on the basis of its hydrophobicity and charge characteristics, e.g.: isoleucine (+4.5); valine (+4.2); leucine (+3.8); phenylalanine (+2.8); cysteine/cystine (+2.5); methionine (+1.9); alanine (+1.8); glycine (−0.4); threonine (−0.7); serine (−0.8); tryptophan (−0.9); tyrosine (−1.3); proline (−1.6); histidine (−3.2); glutamate (−3.5); glutamine (−3.5); aspartate (−3.5); asparagine (−3.5); lysine (−3.9); and arginine (−4.5).

[0400] The importance of the hydropathic profile in conferring interactive biological function on a protein is understood in the art (see, e.g., Kyte et al., 1982, J. Mol. Biol. 157:105-131). It is known that certain amino acids may be substituted for other amino acids having a similar hydropathic index or score and still retain a similar biological activity. In making changes based upon the hydropathic index, in certain embodiments, the substitution of amino acids whose hydropathic indices are within ±2 is included. In some embodiments, those which are within ±1 are included, and in some embodiments, those within ±0.5 are included.

[0401] It is also understood in the art that the substitution of like amino acids can be made effectively on the basis of hydrophilicity, particularly where the biologically functional protein or peptide thereby created is intended for use in immunological embodiments. In some embodiments, the greatest local average hydrophilicity of a protein, as governed by the hydrophilicity of its adjacent amino acids, correlates with its immunogenicity and antigen-binding or immunogenicity, that is, with a biological property of the protein.

[0402] The following hydrophilicity values have been assigned to these amino acid residues: arginine (+3.0); lysine (+3.0); aspartate (+3.0±1); glutamate (+3.0±1); serine (+0.3); asparagine (+0.2); glutamine (+0.2); glycine (0); threonine (−0.4); proline (−0.5±1); alanine (−0.5); histidine (−0.5); cysteine (−1.0); methionine (−1.3); valine (−1.5); leucine (−1.8); isoleucine (−1.8); tyrosine (−2.3); phenylalanine (−2.5) and tryptophan (−3.4). In making changes based upon similar hydrophilicity values, in certain embodiments, the substitution of amino acids whose hydrophilicity values are within 2 is included, in other embodiments, those which are within 1 are included, and in still other embodiments, those within 0.5 are included. In some instances, one may also identify epitopes from primary amino acid sequences on the basis of hydrophilicity. These regions are also referred to as “epitopic core regions.”

[0403] Non-limiting examples of conservative amino acid substitutions are set forth in Table 1.

TABLE 1
Non-Limiting Example Conservative Amino Acid Substitutions

| | | Specific Example |
|---|---|---|
| Original | Example Substitutions | Substitutions |
| Ala (A) | Val, Leu, Ile | Val |
| Arg (R) | Lys, Gln, Asn | Lys |
| Asn (N) | Gln, His, Asp, Lys, Arg | Gln |
| Asp (D) | Glu, Asn | Glu |
| Cys (C) | Ser, Ala | Ser |
| Gln (Q) | Asn, Glu | Asn |
| Glu (E) | Asp, Gln | Asp |
| Gly (G) | Ala | Ala |
| His (H) | Asn, Gln, Lys, Arg | Arg |
| Ile (I) | Leu, Val, Met, Ala, Phe | Leu |
| Leu (L) | Norleucine, Ile, Val, Met, Ala | Ile |
| Lys (K) | Arg, Gln, Asn | Arg |
| Met (M) | Leu, Phe, Ile | Leu |
| Phe (F) | Leu, Val, Ile, Ala, Tyr | Tyr |
| Pro (P) | Ala | Ala |
| Ser (S) | Thr | Thr |
| Thr (T) | Ser | Ser |
| Trp (W) | Tyr, Phe | Tyr |
| Tyr (Y) | Trp, Phe, Thr, Ser | Phe |
| Val (V) | Ile, Leu, Met, Phe, Ala | Leu |

[0404] As used herein, an “amino acid mimetic” is a chemical compound that has a structure that is different from the general chemical structure of an amino acid but that functions in a manner similar to a naturally occurring amino acid. Examples include, but are not limited to, a methacryloyl or acryloyl derivative of an amide, β-, γ-, δ-imino acids (such as, e.g., piperidine-4-carboxylic acid), and the like.

[0405] As used herein, a “non-naturally occurring amino acid” is a compound that has the same basic chemical structure as a naturally occurring amino acid but is not incorporated into a growing polypeptide chain by the translation complex. “Non-naturally occurring amino acid” also refers to, but is not limited to, amino acids that occur by modification (e.g., post-translational modification(s)) of a naturally encoded amino acid (including but not limited to, the 20 common amino acids) but are not themselves naturally incorporated into a growing polypeptide chain by the translation complex. A non-limiting list of examples of non-naturally occurring amino acids that can be inserted into a polypeptide sequence or substituted for a wild-type residue in a polypeptide sequence include β-amino acids, homoamino acids, cyclic amino acids, and amino acids with derivatized side chains. Examples include (in the L-form or D-form; abbreviated as in parentheses) but are not limited to: citrulline (Cit), homocitrulline (hCit), Nα-methylcitrulline (NMeCit), Nα-methylhomocitrulline (Nα-MeHoCit), ornithine (Orn), Nα-Methylornithine (Nα-MeOrn or NMeOrn), sarcosine (Sar), homolysine (hLys or hK), homoarginine (hArg or hR), homoglutamine (hQ), Nα-methylarginine (NMeR), Nα-methylleucine (Nα-MeL or NMeL), N-methylhomolysine (NMeHoK), Nα-methylglutamine (NMeQ), norleucine (Nle), norvaline (Nva), 1,2,3,4-tetrahydroisoquinoline (Tic), Octahydroindole-2-carboxylic acid (Oic), 3-(1-naphthyl)alanine (1-Nal), 3-(2-naphthyl)alanine (2-Nal), 1,2,3,4-tetrahydroisoquinoline (Tic), 2-indanylglycine (IgI), para-iodophenylalanine (pI-Phe), para-aminophenylalanine (4AmP or 4-Amino-Phe), 4-guanidino phenylalanine (Guf), glycyllysine (abbreviated “K (NF-glycyl)” or “K(glycyl)” or “K(gly)”), nitrophenylalanine (nitrophe), aminophenylalanine (aminophe or Amino-Phe), benzylphenylalanine (benzylphe), γ-carboxyglutamic acid (γ-carboxyglu), hydroxyproline (hydroxypro), p-carboxyl-phenylalanine (Cpa), α-aminoadipic acid (Aad), Nα-methyl valine (NMeVal), N-α-methyl leucine (NMeLeu), Nα-methylnorleucine (NMeNle), cyclopentylglycine (Cpg), cyclohexylglycine (Chg), acetylarginine (acetylarg), a, β-diaminopropionoic acid (Dpr), a, γ-diaminobutyric acid (Dab), diaminopropionic acid (Dap), cyclohexylalanine (Cha), 4-methyl-phenylalanine (MePhe), β, β-diphenyl-alanine (BiPhA), aminobutyric acid (Abu), 4-phenyl-phenylalanine (or biphenylalanine; 4Bip), α-amino-isobutyric acid (Aib), beta-alanine, beta-aminopropionic acid, piperidinic acid, aminocaprioic acid, aminoheptanoic acid, aminopimelic acid, desmosine, diaminopimelic acid, N-ethylglycine, N-ethylaspargine, hydroxylysine, allo-hydroxylysine, isodesmosine, allo-isoleucine, N-methylglycine, N-methylisoleucine, N-methylvaline, 4-hydroxyproline (Hyp), γ-carboxyglutamate, ε-N,N,N-trimethyllysine, ε-N-acetyllysine, O-phosphoserine, N-acetylserine, N-formylmethionine, 3-methylhistidine, 5-hydroxylysine, ω-methylarginine, 4-amino-O-phthalic acid (4APA), and other similar amino acids, and derivatized forms of any of those specifically listed.

[0406] As used herein, the term “antigen” refers to a molecule or a portion of a molecule capable of being bound by a selective binding agent, such as an antigen binding protein (including, e.g., an antibody), and additionally capable of being used in an animal to produce antibodies capable of binding to that antigen. An antigen may possess one or more epitopes that are capable of interacting with different antigen binding proteins, e.g., antibodies.

[0407] As used herein, an “antigen-binding region” refers to a protein, or a portion of a protein, that specifically binds a specified antigen. For example, that portion of an antigen-binding protein that contains the amino acid residues that interact with an antigen and confer on the antigen-binding protein its specificity and affinity for the antigen is referred to as “antigen binding region.” An antigen-binding region typically includes one or more “complementary binding regions” (“CDRs”) of an immunoglobulin, single-chain immunoglobulin, or camelid antibody. Certain antigen binding regions also include one or more “framework” regions. A “CDR” is an amino acid sequence that contributes to antigen binding specificity and affinity. “Framework” regions can aid in maintaining the proper conformation of the CDRs to promote binding between the antigen-binding region and an antigen.

[0408] As used herein, the term “polypeptide” refers to a polymer of amino acid residues. Polypeptides comprising between two and fifty amino acids may also be referred to as “peptides” herein. “Polypeptide” further encompasses an amino acid polymer in which one or more amino acid residues is an analog or mimetic of a corresponding naturally occurring amino acid, as well as to naturally occurring amino acid polymers. The term can also encompass an amino acid polymer that have been modified, e.g., by the addition of carbohydrate residues to form glycoproteins, or phosphorylated. Polypeptides can be produced by a naturally-occurring and non-recombinant cell, or polypeptides can be produced by a genetically-engineered or recombinant cell, and comprise molecules having the amino acid sequence of the native protein, or molecules having deletions from, additions to, and/or substitutions of one or more amino acids of the native sequence. The terms “polypeptide” and “protein” are used interchangeably herein.

[0409] As used herein, the term “polypeptide fragment” refers to a polypeptide that has an amino-terminal deletion, a carboxyl-terminal deletion, and/or an internal deletion as compared with a reference polypeptide. Such fragments may also contain modified amino acids as compared with the reference polypeptide. In certain embodiments, fragments are five to 500 amino acids long. For example, fragments may be at least 5, 6, 8, 10, 14, 20, 50, 70, 100, 110, 150, 200, 250, 300, 350, 400, or 450 amino acids long.

[0410] As used herein, a “variant” of a polypeptide (e.g., an antigen-binding protein such as an antibody) comprises an amino acid sequence wherein one or more amino acid residues are inserted into, deleted from and/or substituted into the amino acid sequence relative to a reference polypeptide sequence. Variants include fusion proteins.

[0411] As used herein, a “derivative” of a polypeptide is a polypeptide (e.g., an antigen binding protein such as an antibody) that has been chemically modified in some manner distinct from insertion, deletion, or substitution variants, such as, e.g., via conjugation to another chemical moiety.

[0412] As used herein, the terms “chemical derivative” or “chemically derivatized,” with respect to a polypeptide, refer to a polypeptide that comprises one or more residues that have been chemically derivatized by reaction of a functional side group. Such derivatized molecules include, for example, those molecules in which free amino groups have been derivatized to form amine hydrochlorides, p-toluene sulfonyl groups, carbobenzoxy groups, t-butyloxycarbonyl groups, chloroacetyl groups, or formyl groups. For example, free carboxyl groups can be derivatized to form salts, methyl and ethyl esters, or other types of esters or hydrazides. Additionally, free hydroxyl groups can be derivatized to form O-acyl or O-alkyl derivatives, and the imidazole nitrogen of histidine can be derivatized to form Nim-benzylhistidine.

[0413] Non-limiting examples of derivatizations also include the following:

[0414] Chemical modification of the amino terminal of the polypeptide: In some embodiments, the N-terminus can be acylated or modified to a substituted amine, or derivatized with another functional group, such as an aromatic moiety (e.g., an indole acid, benzyl (Bzl or Bn), dibenzyl (DiBzl or Bn₂), or benzyloxycarbonyl (Cbz or Z)), N,N-dimethylglycine, or creatine). For example, in some embodiments, an acyl moiety, such as, but not limited to, a formyl, acetyl (Ac), propanoyl, butanyl, heptanyl, hexanoyl, octanoyl, or nonanoyl, can be covalently linked to the N-terminal end of the polypeptide. Other example N-terminal derivative groups include, but are not limited to, —NRR¹ (other than —NH₂), —NRC(O)R¹, —NRC(O)OR¹, —NRS(O)₂R¹, —NHC(O)NHR¹, succinimide, or benzyloxycarbonyl-NH— (Cbz-NH—), wherein R and R¹ are each independently hydrogen or C₁₋₄ alkyl and wherein the phenyl ring may be substituted with 1 to 3 substituents independently selected from C₁₋₄ alkyl, C₁₋₄ alkoxy, chloro, and bromo.

[0415] Bond substitutions: In some embodiments, one or more peptidyl [—C(O)NR—] linkages (bonds) between amino acid residues can be replaced by a non-peptidyl linkage. Example non-peptidyl linkages include, but are not limited to, —CH₂-carbamate [—CH₂—OC(O)NR—], phosphonate, —CH₂-sulfonamide [—CH₂—S(O)₂NR—], urea [—NHC(O)NH—], —CH₂-secondary amine, and alkylated peptide [—C(O)NR⁶—, wherein R⁶ is C₁₋₄ alkyl].

[0416] Derivatization of one or more individual amino acid residues: In some embodiments, lysinyl residues and amino terminal residues can be reacted with succinic or other carboxylic acid anhydrides, which reverse the charge of the lysinyl residues. Other suitable reagents for derivatizing alpha-amino-containing residues include, but are not limited to, imidoesters such as methyl picolinimidate; pyridoxal phosphate; pyridoxal; chloroborohydride; trinitrobenzenesulfonic acid; O-methylisourea; 2,4 pentanedione; and transaminase-catalyzed reaction with glyoxylate.

[0417] In some embodiments, arginyl residues can be modified by reaction with any one or more of several conventional reagents, including phenylglyoxal, 2,3-butanedione, 1,2-cyclohexanedione, and ninhydrin. Derivatization of arginyl residues requires that the reaction be performed in alkaline conditions because of the high pKa of the guanidine functional group. Furthermore, these reagents can react with the groups of lysine as well as the arginine epsilon-amino group.

[0418] Specific modification of tyrosyl residues has been studied extensively, with particular interest in introducing spectral labels into tyrosyl residues by reaction with aromatic diazonium compounds or tetranitromethane. Most commonly, N-acetylimidizole and tetranitromethane are used to form 0-acetyl tyrosyl species and 3-nitro derivatives, respectively.

[0419] In some embodiments, carboxyl sidechain groups (aspartyl or glutamyl) can be selectively modified by reaction with carbodiimides (R′—N═C═N—R′) such as 1-cyclohexyl-3-(2-morpholinyl-(4-ethyl) carbodiimide or 1-ethyl-3-(4-azonia-4,4-dimethylpentyl) carbodiimide. Furthermore, in some embodiment, aspartyl and glutamyl residues can be converted to asparaginyl and glutaminyl residues by reaction with ammonium ions.

[0420] In some embodiments, glutaminyl and asparaginyl residues can be deamidated to the corresponding glutamyl and aspartyl residues. In alternative embodiments, these residues are deamidated under mildly acidic conditions.

[0421] In some embodiments, cysteinyl residues can be replaced by amino acid residues or other moieties either to eliminate disulfide bonding or, conversely, to stabilize cross-linking. (See, e.g., Bhatnagar et al., J. Med. Chem., 39:3814-3819 (1996)).

[0422] Other possible modifications include, but are not limited to, hydroxylation of proline and lysine, phosphorylation of hydroxyl groups of seryl or threonyl residues, oxidation of the sulfur atom in Cys, methylation of the alpha-amino groups of lysine, arginine, and histidine side chains. Creighton, Proteins: Structure and Molecule Properties (W. H. Freeman & Co., San Francisco), 79-86 (1983).

[0423] As used herein, the term “alkyl” refers to a saturated straight chain hydrocarbon or saturated branched chain hydrocarbon containing the indicated number of carbon atoms. For example, C₃ alkyl means an alkyl group that has 3 carbon atoms (e.g., n-propyl or isopropyl). For example, a C₁₋₆ alkyl refers to an alkyl group having 1 to 6 carbon atoms. Where a range is indicated, all members of that range and all subgroups within that range are envisioned. For example, a C₁₋₆ alkyl includes alkyl groups having 1, 2, 3, 4, 5, or 6 carbon atoms (or any combination of the foregoing), as well as all subgroups in the indicated range (e.g., 1-2, 1-3, 1-4, 1-5, 1-6, 2-3, 2-4, 2-5, 2-6, 3-4, 3-5, 3-6, 4-5, 4-6, or 5-6 carbon atoms, or any combination of the foregoing ranges)). A “C₁₋₄ alkyl” includes, for example, methyl, ethyl, n-propyl, isopropyl, n-butyl, isobutyl, sec-butyl, or t-butyl. Nonlimiting examples of alkyl groups include methyl, ethyl, n-propyl, isopropyl, n-butyl, sec-butyl, isobutyl, tert-butyl, n-pentyl, and n-hexyl.

[0424] A molecule of the present disclosure that includes a polypeptide which is covalently linked, attached, or bound, either directly or indirectly through a linker moiety (e.g., a linker polypeptide), to another polypeptide, such as, e.g., an anti-GIPR antibody of the present disclosure, may be described herein as a “conjugate.”

[0425] As used herein, the term “thiol” refers to a —SH group.

[0426] As used herein, the terms “alkoxy” and “alkoxyl” are interchangeable and refer to an —O-alkyl group, where the alkyl group is as defined elsewhere herein. For example, a C₃alkoxy group means the alkoxy group has 3 carbon atoms (e.g., OCH₂CH₂CH₃). Where a range is indicated, all members of that range and all subgroups within that range are envisioned. For example, a C₁₋₆alkoxy includes alkoxy groups having 2, 3, 4, 5, or 6 carbon atoms, or any combination of the foregoing, as well as all subgroups in the indicated range (e.g., 2-3, 2-4, 2-5, 2-6, 3-4, 3-5, 3-6, 4-5, 4-6, and 5-6 carbon atoms, or any combination of the foregoing). Nonlimiting examples of alkoxy groups include methoxy, ethoxy, n-propoxy, 1-methylethyloxy (iso-propoxy), n-butoxy, isobutoxy, sec-butoxy, and tert-butoxy.

[0427] As used herein, the term “linker moiety” refers to a biologically acceptable peptidyl or non-peptidyl organic group that is covalently bound to a first molecule (e.g., a first polypeptide) and covalently joins or conjugates the molecule to a second molecule (e.g., a second polypeptide). Where the linker moiety consists of a polypeptide or a polypeptide derivative (e.g., a polypeptide that has been chemically modified at one or both of the N-terminus and C-terminus to incorporate a functional group that permits conjugation to the first or second molecule), it may be referred to as a “linker polypeptide” herein. For example, in some embodiments, a linker polypeptide may comprise an acetylated N-terminus (e.g., when a thiol-bromoacetyl reaction was used to conjugate the derivatized N-terminus of the linker polypeptide to a cysteine residue of a polypeptide by forming a thioether linkage that comprises a sulfur atom of the cysteine residue).

[0428] As used herein, the term “isolated polypeptide” refers to a polypeptide that has been separated from at least about 50 percent of polypeptides, lipids, carbohydrates, polynucleotides, or other materials with which the polypeptide is naturally found when isolated from a source cell. In some embodiments, the isolated polypeptide is substantially free from any other contaminating polypeptides or other contaminants that are found in its natural environment that would interfere with its therapeutic, diagnostic, prophylactic, or research use.

[0429] As used herein, the term “antigen-binding protein” refers to any protein that specifically binds a specified target antigen, such as a GIPR polypeptide (e.g., a human GIPR polypeptide such as those provided in SEQ ID NOs: 1577, 1578, or 1579). The term encompasses intact antibodies that comprise at least two full-length heavy chains and two full-length light chains, as well as derivatives, variants, fragments, and mutations thereof. An antigen-binding protein also includes domain antibodies such as nanobodies and scFvs as described further below.

[0430] An antigen-binding protein, such as, e.g., an anti-GIPR polypeptide, is said to “specifically bind” its target antigen when the antigen binding protein exhibits essentially background binding to non-target antigen molecules. An antigen binding protein that specifically binds a target antigen may, however, cross-react with target antigens from different species. Typically, an antigen binding protein specifically binds its target antigen when the dissociation constant (K_{D}) is ≤10⁻⁷ M as measured via a surface plasma resonance technique (e.g., BIACore, GE-Healthcare Uppsala, Sweden) or Kinetic Exclusion Assay (KinExA, Sapidyne, Boise, Idaho). An antigen-binding protein specifically binds its target antigen with “high affinity” when the K_{D} is ≤5×10⁻⁹ M, and with “very high affinity” when the K_{D} is ≤5×10⁻¹⁰ M, as measured using methods described.

[0431] As used herein, the term “epitope” is the portion of a molecule that is bound by an antigen-binding protein (e.g., an antibody). The term includes any determinant capable of specifically binding to an antigen-binding protein, such as an antibody. An epitope can be contiguous or non-contiguous (discontinuous) (e.g., amino acid residues that are not contiguous to one another in an amino acid sequence but that within in context of the molecule are bound by the antigen-binding protein). A conformational epitope is an epitope that exists within the conformation of an active protein but is not present in a denatured protein. In some embodiments, epitopes may be mimetic in that they comprise a three dimensional structure that is similar to an epitope used to generate the antigen-binding protein, yet comprise none or only some of the amino acid residues found in that epitope used to generate the antigen binding protein. More often, epitopes reside on proteins, but in some instances may reside on other kinds of molecules, such as nucleic acids. Epitope determinants may include chemically active surface groupings of molecules such as amino acids, sugar side chains, phosphoryl or sulfonyl groups, and may have specific three dimensional structural characteristics, and/or specific charge characteristics. Generally, antigen-binding proteins specific for a particular target antigen will preferentially recognize an epitope on the target antigen in a complex mixture of proteins and/or macromolecules.

[0432] As used herein, a “bivalent antigen-binding protein” (e.g., a bivalent antibody) comprises two antigen binding regions. In some instances, the two binding regions have the same antigen specificities. Bivalent antigen binding proteins and bivalent antibodies may be bispecific.

[0433] As used herein, a “multispecific antigen-binding protein” (e.g., a multispecific antibody) is an antigen-binding protein that targets more than one antigen or epitope.

[0434] As used herein, a “bispecific,” “dual-specific” or “bifunctional” antigen-binding protein (e.g., antibody) is a hybrid antigen-binding protein having two different antigen binding sites. Bispecific antigen-binding proteins are a subclass of multispecific antigen-binding proteins and may be produced by a variety of methods including, but not limited to, fusion of hybridomas or linking of Fab′ fragments. See, e.g., Songsivilai and Lachmann, 1990, Clin. Exp. Immunol. 79:315-321; Kostelny et al., 1992, J. Immunol. 148:1547-1553. The two binding sites of a bispecific antigen binding protein will bind to two different epitopes, which may reside on the same or different protein targets.

[0435] As used herein, the term “antibody” refers to an intact immunoglobulin of any isotype, and includes, for instance, chimeric, humanized, fully human, and bispecific antibodies. An “antibody” as such is a species of an antigen-binding protein. An antibody generally comprises two full-length heavy chains and two full-length light chains. Antibodies may be derived solely from a single source, or may be “chimeric,” that is, different portions of the antibody may be derived from two different antibodies as described further below.

[0436] As used herein, the term “light chain” or “immunoglobulin light chain” refers to a polypeptide comprising, from amino terminus (N-terminus) to carboxyl terminus (C-terminus), a single immunoglobulin light chain variable region (VL) and a single immunoglobulin light chain constant domain (CL). The immunoglobulin light chain constant domain (CL) can be a human kappa (κ) or human lambda (λ) constant domain.

[0437] As used herein, the term “heavy chain” or “immunoglobulin heavy chain” refers to a polypeptide comprising, from amino terminus (N-terminus) to carboxyl terminus (C-terminus), a single immunoglobulin heavy chain variable region (VH), an immunoglobulin heavy chain constant domain 1 (CH1), an immunoglobulin hinge region, an immunoglobulin heavy chain constant domain 2 (CH2), an immunoglobulin heavy chain constant domain 3 (CH3), and optionally an immunoglobulin heavy chain constant domain 4 (CH4). Heavy chains are classified as mu (μ), delta (Δ), gamma (γ), alpha (α), and epsilon (ε), and define the antibody's isotype as IgM, IgD, IgG, IgA, and IgE, respectively. The IgG-class and IgA-class antibodies are further divided into subclasses, namely, IgG1, IgG2, IgG3, and IgG4, and IgA1 and IgA2, respectively. The heavy chains in IgG, IgA, and IgD antibodies have three constant domains (CH1, CH2, and CH3), whereas the heavy chains in IgM and IgE antibodies have four constant domains (CH1, CH2, CH3, and CH4). The immunoglobulin heavy chain constant domains can be from any immunoglobulin isotype, including subtypes. The antibody chains are linked together via inter-polypeptide disulfide bonds between the CL domain and the CH1 domain (i.e. between the light and heavy chain) and between the hinge regions of the two antibody heavy chains.

[0438] Variable regions of immunoglobulin chains generally exhibit the same overall structure, comprising relatively conserved framework regions (FR) joined by three hypervariable regions, more often called “complementarity determining regions” or CDRs. The CDRs from the two chains of each heavy chain and light chain pair typically are aligned by the framework regions to form a structure that binds specifically to a specific epitope on the target protein. From N-terminus to C-terminus, naturally-occurring light and heavy chain variable regions both typically conform with the following order of these elements: FR1, CDR1, FR2, CDR2, FR3, CDR3, and FR4. A numbering system has been devised for assigning numbers to amino acids that occupy positions in each of these domains. This numbering system is defined in Kabat Sequences of Proteins of Immunological Interest (1987 and 1991, NIH, Bethesda, MD), or Chothia & Lesk, 1987, J. Mol. Biol. 196:901-917; Chothia et al., 1989, Nature 342:878-883. The CDRs and FRs of a given antibody may be identified using this system. Other numbering systems for the amino acids in immunoglobulin chains include IMGT® (the international ImMunoGeneTics information system; Lefranc et al., Dev. Comp. Immunol. 29:185-203; 2005) and AHo (Honegger and Pluckthun, J. Mol. Biol. 309(3):657-670; 2001).

[0439] As used herein, the term “immunologically functional fragment” (or simply “fragment” or “functional fragment”) of an antibody is an antigen-binding protein comprising a portion (regardless of how that portion is obtained or synthesized) of an antibody that lacks at least some of the amino acids present in a full-length chain but which is capable of specifically binding to the same antigen at the same epitope as the antibody. Such fragments are biologically active in that they bind specifically to the target antigen and can compete with other antigen binding proteins, including intact antibodies, for specific binding to a given epitope. These biologically active fragments may be produced by recombinant DNA techniques, or may be produced by enzymatic or chemical cleavage of antigen binding proteins, including intact antibodies. Immunologically functional immunoglobulin fragments include, but are not limited to, Fab, Fab′, and F(ab′)₂ fragments.

[0440] Papain digestion of antibodies produces two identical antigen-binding proteins, called “Fab” fragments, each with a single antigen-binding site, and a residual “Fc” fragment which contains all but the first domain of the immunoglobulin heavy chain constant region. The Fab fragment contains the variable domains from the light and heavy chains, as well as the constant domain of the light chain and the first constant domain (CH1) of the heavy chain. Thus, a “Fab fragment” is comprised of one immunoglobulin light chain (light chain variable region (VL) and constant region (CL)) and the CH1 domain and variable region (VH) of one immunoglobulin heavy chain. The heavy chain of a Fab molecule cannot form a disulfide bond with another heavy chain molecule. The “Fd fragment” comprises the VH and CH1 domains from an immunoglobulin heavy chain. The Fd fragment represents the heavy chain component of the Fab fragment.

[0441] As used herein, a “Fc fragment” or “Fc region” of an immunoglobulin generally comprises two constant domains, a CH2 domain and a CH3 domain, and optionally comprises a CH4 domain. The Fc region may be an Fc region from an IgG1, IgG2, IgG3, or IgG4 immunoglobulin. In some embodiments, the Fc region comprises CH2 and CH3 domains from a human IgG1 or human IgG2 immunoglobulin. The Fc region may retain effector function, such as C1q binding, complement dependent cytotoxicity (CDC), Fc receptor binding, antibody-dependent cell-mediated cytotoxicity (ADCC), and phagocytosis. In other embodiments, the Fc region may be modified to reduce or eliminate effector function.

[0442] As used herein, a “Fab′ fragment” contains one light chain and a portion of one heavy chain that contains the VH domain and the CH1 domain and also the region between the CH1 and CH2 domains, such that an interchain disulfide bond can be formed between the two heavy chains of two Fab′ fragments to form an F(ab′)₂ molecule.

[0443] As used herein, a “F(ab′)₂ fragment” contains two light chains and two heavy chains containing a portion of the constant region between the CH1 and CH2 domains, such that an interchain disulfide bond is formed between the two heavy chains. A F(ab′)₂ fragment thus is composed of two Fab′ fragments that are held together by a disulfide bond between the two heavy chains.

[0444] As used herein, a “Fv region” comprises the variable regions from both the heavy and light chains, but lacks the constant regions. The “Fv” fragment is the minimum fragment that contains a complete antigen recognition and binding site from an antibody. This fragment consists of a dimer of one immunoglobulin heavy chain variable region (VH) and one immunoglobulin light chain variable region (VL) in tight, non-covalent association. It is in this configuration that the three CDRs of each variable region interact to define an antigen binding site on the surface of the VH-VL dimer. A single light chain or heavy chain variable region (or half of an Fv fragment comprising only three CDRs specific for an antigen) has the ability to recognize and bind antigen, although at a lower affinity than the entire binding site comprising both VH and VL.

[0445] As used herein, a “single-chain variable fragment” or “scFv fragment” comprises the VH and VL regions of an antibody, wherein these regions are present in a single polypeptide chain, and optionally comprising a peptide linker between the VH and VL regions that enables the Fv to form the desired structure for antigen binding (see e.g., Bird et al., Science, Vol. 242:423-426, 1988; and Huston et al., Proc. Natl. Acad. Sci. USA, Vol. 85:5879-5883, 1988).

[0446] As used herein, a “nanobody” is the heavy chain variable region of a heavy-chain antibody. Such variable domains are the smallest fully functional antigen-binding fragment of such heavy-chain antibodies with a molecular mass of only 15 kDa. See Cortez-Retamozo et al., Cancer Research 64:2853-57, 2004. Functional heavy-chain antibodies devoid of light chains are naturally occurring in certain species of animals, such as nurse sharks, wobbegong sharks, and Camelidae, such as camels, dromedaries, alpacas and llamas. The antigen-binding site is reduced to a single domain, the VHH domain, in these animals. These antibodies form antigen-binding regions using only heavy chain variable region, i.e., these functional antibodies are homodimers of heavy chains only having the structure H2L2 (referred to as “heavy-chain antibodies” or “HCAbs”). Camelized VHH reportedly recombines with IgG2 and IgG3 constant regions that contain hinge, CH2, and CH3 domains and lack a CH1 domain. Camelized VHH domains have been found to bind to antigen with high affinity (Desmyter et al., J. Biol. Chem., Vol. 276:26285-90, 2001) and possess high stability in solution (Ewert et al., Biochemistry, Vol. 41:3628-36, 2002). Methods for generating antibodies having camelized heavy chains are described in, for example, U.S. Patent Publication Nos. 2005/0136049 and 2005/0037421. Alternative scaffolds can be made from human variable-like domains that more closely match the shark V-NAR scaffold and may provide a framework for a long penetrating loop structure.

[0447] As used herein, the term “heavy chain-only antibody” refers to an immunoglobulin protein consisting of two heavy chain polypeptides (such as, e.g., heavy chain polypeptides that are about 50-70 kDa each). A “heavy chain-only antibody” lacks the two light chain polypeptides found in a conventional antibody. Heavy-chain antibodies constitute about one-fourth of the IgG antibodies produced by the camelids, e.g., camels and llamas (Hamers-Casterman C., et al. Nature. 363, 446-448 (1993)). These molecules are formed by two heavy chains but are devoid of light chains. As a consequence, the variable antigen binding part is referred to as the VHH domain, and it represents the smallest naturally occurring, intact, antigen-binding site, being only around 120 amino acids in length (Desmyter, A., et al. J. Biol. Chem. 276, 26285-26290 (2001)). Heavy chain antibodies with a high specificity and affinity can be generated against a variety of antigens through immunization (van der Linden, R. H., et al. Biochim. Biophys. Acta. 1431, 37-46 (1999)), and the VHH portion can be readily cloned and expressed in yeast (Frenken, L. G. J., et al. J. Biotechnol. 78, 11-21 (2000)). Their levels of expression, solubility and stability are significantly higher than those of classical F(ab) or Fv fragments (Ghahroudi, M. A. et al. FEBS Lett. 414, 521-526 (1997)). Sharks have also been shown to have a single VH-like domain in their antibodies, termed VNAR. (Nuttall et al. Eur. J. Biochem. 270, 3543-3554 (2003); Nuttall et al. Function and Bioinformatics 55, 187-197 (2004); Dooley et al., Molecular Immunology 40, 25-33 (2003).)

[0448] In some embodiments, a “heavy chain-only antibody” is a dimeric antibody comprising a VH antigen-binding domain and the CH2 and CH3 constant domains, in the absence of the CH1 domain. In some embodiments, a heavy chain-only antibody is composed of a variable region antigen-binding domain composed of framework 1, CDR1, framework 2, CDR2, framework 3, CDR3, and framework 4. In some embodiments, a heavy chain-only antibody is composed of an antigen-binding domain, at least part of a hinge region, and CH2 and CH3 domains. In some embodiments, a heavy chain-only antibody is composed of an antigen-binding domain, at least part of a hinge region, and a CH2 domain. In some embodiments, a heavy chain-only antibody is composed of an antigen-binding domain, at least part of a hinge region, and a CH3 domain.

[0449] Heavy chain-only antibodies in which the CH2 and/or CH3 domain is truncated are also included herein. The heavy chain-only antibodies described herein may belong to the IgG subclass, but heavy chain-only antibodies belonging to other subclasses, such as IgM, IgA, IgD and IgE subclass, are also included herein. In some embodiments, a heavy chain-only antibody may belong to the IgG1, IgG2, IgG3, or IgG4 subtype, e.g., the IgG1 or IgG4 subtype. In some embodiments, a heavy chain antibody-only is of the IgG1 or IgG4 subtype, wherein one or more of the CH domains is modified to alter an effector function of the antibody. In some embodiments, a heavy chain-only antibody is of the IgG4 subtype, wherein one or more of the CH domains is modified to alter an effector function of the antibody. In some embodiments, a heavy chain-only antibody is of the IgG1 subtype, wherein one or more of the CH domains is modified to alter an effector function of the antibody. Modifications of CH domains that alter effector function are further described herein. Non-limiting examples of heavy-chain-only antibodies are described, for example, in WO2018/039180, the disclosure of which is incorporated herein by reference herein in its entirety.

[0450] As used herein, the term “three-chain antibody like molecule” or “TCA” refers to an antibody-like molecule comprising, consisting essentially of, or consisting of three polypeptide subunits, two of which comprise, consist essentially of, or consist of one heavy and one light chain of an antibody, or antigen-binding fragments of such antibody chains, comprising an antigen-binding region and at least one CH domain. This heavy chain/light chain pair has binding specificity for a first antigen. The third polypeptide subunit comprises, consists essentially of, or consists of a heavy-chain only antibody comprising an Fc portion comprising CH2 and/or CH3 and/or CH4 domains, in the absence of a CH1 domain, and one or more antigen binding domains (such as, e.g., two antigen binding domains) that binds an epitope of a second antigen or a different epitope of the first antigen, where such binding domain is derived from or has sequence identity with the variable region of an antibody heavy or light chain. Parts of such variable region may be encoded by VH and/or VL gene segments, D and JH gene segments, or JL gene segments. The variable region may be encoded by rearranged VHDJH, VLDJH, VHJL, or VLJL gene segments.

[0451] As used herein, the term “identical,” in the context of two or more nucleic acids or polypeptide sequences, refer to two or more sequences or subsequences that are the same.

[0452] As used herein, “percent identity” means the percent of identical residues between the amino acids or nucleotides in compared molecules and is calculated based on the size of the smallest of the molecules being compared. For these calculations, gaps in alignments (if any) can be addressed by a particular mathematical model or computer program (i.e., an “algorithm”). Methods that can be used to calculate the identity of the aligned nucleic acids or polypeptides include those described in Computational Molecular Biology, (Lesk, A. M., ed.), (1988) New York: Oxford University Press; Biocomputing Informatics and Genome Projects, (Smith, D. W., ed.), 1993, New York: Academic Press; Computer Analysis of Sequence Data, Part I, (Griffin, A. M., and Griffin, H. G., eds.), 1994, New Jersey: Humana Press; von Heinje, G., (1987) Sequence Analysis in Molecular Biology, New York: Academic Press; Sequence Analysis Primer, (Gribskov, M. and Devereux, J., eds.), 1991, New York: M. Stockton Press; and Carillo et al., (1988) SIAM J. Applied Math. 48:1073.

[0453] In calculating percent identity, the sequences being compared are aligned in a way that gives the largest match between the sequences. The computer program used to determine percent identity is the GCG program package, which includes GAP (Devereux et al., (1984) Nucl. Acid Res. 12:387; Genetics Computer Group, University of Wisconsin, Madison, WI). The computer algorithm GAP is used to align the two polypeptides or polynucleotides for which the percent sequence identity is to be determined. The sequences are aligned for optimal matching of their respective amino acid or nucleotide (the “matched span”, as determined by the algorithm). A gap opening penalty (which is calculated as 3× the average diagonal, wherein the “average diagonal” is the average of the diagonal of the comparison matrix being used; the “diagonal” is the score or number assigned to each perfect amino acid match by the particular comparison matrix) and a gap extension penalty (which is usually 1/10 times the gap opening penalty), as well as a comparison matrix such as PAM 250 or BLOSUM 62 are used in conjunction with the algorithm. In some embodiments, a standard comparison matrix (see, Dayhoff et al., (1978) Atlas of Protein Sequence and Structure 5:345-352 for the PAM 250 comparison matrix; Henikoff et al., (1992) Proc. Natl. Acad. Sci. U.S.A. 89:10915-10919 for the BLOSUM 62 comparison matrix) is also used by the algorithm.

[0454] Recommended parameters for determining percent identity for polypeptides or nucleotide sequences using the GAP program are the following:
[0455] Algorithm: Needleman et al., 1970, J. Mol. Biol. 48:443-453;
[0456] Comparison matrix: BLOSUM 62 from Henikoff et al., 1992, supra;
[0457] Gap Penalty: 12 (but with no penalty for end gaps)
[0458] Gap Length Penalty: 4
[0459] Threshold of Similarity: 0

[0460] Certain alignment schemes for aligning two amino acid sequences can result in matching of only a short region of the two sequences, and this small, aligned region can have very high sequence identity even though there is no significant relationship between the two full-length sequences. Accordingly, the selected alignment method (e.g., the GAP program) can be adjusted if so desired to result in an alignment that spans at least 50 contiguous amino acids of the target polypeptide.

[0461] As used herein, the terms “GIP,” “gastric inhibitory polypeptide,” “glucose-dependent insulinotropic polypeptide,” and “GIP ligand” are used interchangeably and refer to a naturally-occurring wild-type polypeptide expressed in a mammal, such as a human or a mouse, and include naturally occurring alleles (e.g., naturally occurring allelic forms of human GIP protein). For the purposes of this disclosure, the term “GIP” can be used interchangeably to refer to any mature GIP polypeptide.

[0462] The 42 amino acid sequence of mature human GIP is:

(SEQ ID NO: 1582)
YAEGTFISDY SIAMDKIHQQ DFVNWLLAQK GKKNDWKHINI TQ.

[0463] The 42 amino acid sequence of mature murine GIP is:

(SEQ ID NO: 1583)
YAEGTFISDY SIAMDKIRQQ DFVNWLLAQR GKKSDWKHNI TQ.

[0464] The 42 amino acid sequence of mature rat GIP is:

(SEQ ID NO: 1584)
YAEGTFISDY SIAMDKIRQQ DFVNWLLAQK GKKNDWKHINL TQ.

[0465] Additionally, as used herein, the terms “GIPR polypeptide” and “GIPR protein” are used interchangeably and refer to a naturally-occurring wild-type polypeptide expressed in a mammal, such as a human or a mouse, and include naturally occurring alleles (e.g., naturally occurring allelic forms of human GIPR protein). For the purposes of this disclosure, the term “GIPR polypeptide” can be used interchangeably to refer to any full-length GIPR polypeptide, e.g., SEQ ID NO: 1577, which consists of 466 amino acid residues, or SEQ ID NO: 1578, which consists of 430 amino acid residues, or SEQ ID NO: 1579, which consists of 493 amino acid resides, or SEQ ID NO: 1580, which consists of 460 amino acids residues, or SEQ ID NO: 1581, which consists of 230 amino acids residues.

[0466] The 466 amino acid sequence of human GIPR is (Volz et al., FEBS Lett. 373:23-29 (1995); NCBI Reference Sequence NP_0001555):

(SEQ ID NO: 1577)
MTTSPILQLL LRLSLCGLLL QRAETGSKGQ TAGELYQRWE
RYRRECQETL AAAEPPSGLA CNGSFDMYVC WDYAAPNATA
RASCPWYLPW HHHVAAGFVL RQCGSDGQWG LWRDHTQCEN
PEKNEAFLDQ RLILERLQVM YTVGYSLSLA TLLLALLILS
LFRRLHCTRN YIHINLFTSF MLRAAAILSR DRLLPRPGPY
LGDQALALWN QALAACRTAQ IVTQYCVGAN YTWLLVEGVY
LHSLLVLVGG SEEGHFRYYL LLGWGAPALF VIPWVIVRYL
YENTQCWERN EVKAIWWIIR TPILMTILIN FLIFIRILGI
LLSKLRTRQM RCRDYRLRLA RSTLTLVPLL GVHEVVFAPV
TEEQARGALR FAKLGFEIFL SSFQGFLVSV LYCFINKEVQ
SEIRRGWHHC RLRRSLGEEQ RQLPERAFRA LPSGSGPGEV
PTSRGLSSGT LPGPGNEASR ELESYC

[0467] A 430 amino acid isoform of human GIPR (isoform X1), predicted by automated computational analysis, has the sequence (NCBI Reference Sequence XP_005258790):

(SEQ ID NO: 1578)
MTTSPILQLL LRLSLCGLLL QRAETGSKGQ TAGELYQRWE
RYRRECQETL AAAEPPSVAA GFVLRQCGSD GQWGLWRDHT
QCENPEKNEA FLDQRLILER LQVMYTVGYS LSLATLLLAL
LILSLFRRLH CTRNYIHINL FTSFMLRAAA ILSRDRLLPR
PGPYLGDQAL ALWNQALAAC RTAQIVTQYC VGANYTWLLV
EGVYLHSLLV LVGGSEEGHF RYYLLLGWGA PALFVIPWVI
VRYLYENTQC WERNEVKAIW WIIRTPILMT ILINFLIFIR
ILGILLSKLR TRQMRCRDYR LRLARSTLTL VPLLGVHEVV
FAPVTEEQAR GALRFAKLGF EIFLSSFQGF LVSVLYCFIN
KEVQSEIRRG WHHCRLRRSL GEEQRQLPER AFRALPSGSG
PGEVPTSRGL SSGTLPGPGN EASRELESYC

[0468] 493 amino acid isoform of human GIPR, produced by alternative splicing, as the sequence (Gremlich et al., Diabetes 44:1202-8 (1995); UniProtKB Sequence Identifier: P48546-2):

(SEQ ID NO: 1579)
MTTSPILQLL LRLSLCGLLL QRAETGSKGQ TAGELYQRWE
RYRRECQETL AAAEPPSGLA CNGSFDMYVC WDYAAPNATA
RASCPWYLPW HHHVAAGFVL RQCGSDGQWG LWRDHTQCEN
PEKNEAFLDQ RLILERLQVM YTVGYSLSLA TLLLALLILS
LFRRLHCTRN YIHINLFTSF MLRAAAILSR DRLLPRPGPY
LGDQALALWN QALAACRTAQ IVTQYCVGAN YTWLLVEGVY
LHSLLVLVGG SEEGHFRYYL LLGWGAPALF VIPWVIVRYL
YENTQCWERN EVKAIWWIIR TPILMTILIN FLIFIRILGI
LLSKLRTRQM RCRDYRLRLA RSTLTLVPLL GVHEVVFAPV
TEEQARGALR FAKLGFEIFL SSFQGFLVSV LYCFINKEVG
RDPAAAPALW RRRGTAPPLS AIVSQVQSEI RRGWHHCRLR
RSLGEEQRQL PERAFRALPS GSGPGEVPTS RGLSSGTLPG
PGNEASRELE SYC

[0469] The 460 amino acid sequence of murine GIPR is (NCBI Reference Sequence: NP_001074284; UniProtKB/Swiss-Prot Q0P543-1); see Vassilatis et al., PNAS USA 2003, 100:4903-4908.

(SEQ ID NO: 1580)
MPLRLLLLLL WLWGLQWAET DSEGQTTTGE LYQRWEHYGQ
ECQKMLETTE PPSGLACNGS FDMYACWNYT AANTTARVSC
PWYLPWFRQV SAGFVFRQCG SDGQWGSWRD HTQCENPEKN
GAFQDQTLIL ERLQIMYTVG YSLSLTTLLL ALLILSLFRR
LHCTRNYIHM NLFTSFMLRA AAILTRDQLL PPLGPYTGDQ
APTPWNQALA ACRTAQIMTQ YCVGANYTWL LVEGVYLHHL
LVIVGRSEKG HFRCYLLLGW GAPALFVIPW VIVRYLRENT
QCWERNEVKA IWWIIRTPIL ITILINFLIF IRILGILVSK
LRTRQMRCPD YRLRLARSTL TLVPLLGVHE VVFAPVTEEQ
VEGSLRFAKL AFEIFLSSFQ GFLVSVLYCFINKEVQSEIRQ
GWRHRRLRLS LQEQRPRPHQ ELAPRAVPLS SACREAAVGN
ALPSGMLHVP GDEVLESYC

[0470] A 230 amino acid isoform of murine GIPR, produced by alternative splicing, has the sequence (Gerhard et al., Genome Res, 14:2121-2127 (2004); NCBI Reference Sequence: AAI20674):

(SEQ ID NO: 1581)
MPLRLLLLLL WLWGLQWAET DSEGQTTTGE LYQRWEHYGQ
ECQKMLETTE PPSGLACNGS FDMYACWNYT AANTTARVSC
PWYLPWFRQV SAGFVFRQCG SDGQWGSWRD HTQCENPEKN
GAFQDQTLIL ERLQIMYTVG YSLSLTTLLL ALLILSLFRR
LHCTRNYIHM NLFTSFMLRA AAILTRDQLL PPLGPYTGDQ
APTPWNQVLH RLLPGGTKTF PIYFRTFPHH

[0471] As stated herein, the term “GIPR polypeptide” encompasses naturally occurring GIPR polypeptide sequences, e.g., human amino acid sequences SEQ ID NOs: 1577, 1578, or 1579. The term “GIPR polypeptide,” however, also encompasses polypeptides comprising an amino acid sequence that has been modified relative to the amino acid sequence of a naturally occurring GIPR polypeptide sequence, e.g., SEQ ID NOs: 1577, 1578, or 1579, by one or more amino acids, such that the sequence is at least 90% identical to SEQ ID NOs: 1577, 1578, or 1579. Such modifications include, but are not limited to, one or more amino acid substitutions, including substitutions with non-naturally occurring amino acids, non-naturally-occurring amino acid analogs, and amino acid mimetics. For example, GIPR polypeptides can be generated by introducing one or more amino acid substitutions, either conservative or non-conservative and using naturally or non-naturally occurring amino acids, at particular positions of the GIPR polypeptide.

[0472] In some embodiments, a GIPR polypeptide comprises an amino acid sequence that is at least 90 percent identical to a naturally-occurring GIPR polypeptide (e.g., SEQ ID NOs: 1577, 1578, or 1579). In some embodiments, a GIPR polypeptide comprises an amino acid sequence that is at least 95, at least 96, at least 97, at least 98, or at least 99 percent identical to a naturally-occurring GIPR polypeptide amino acid sequence (e.g., SEQ ID NOs: 1577, 1578, or 1579). Such GIPR polypeptides preferably, but need not, possess at least one activity of a wild-type GIPR polypeptide, such as the ability to bind GIP. The present disclosure also encompasses nucleic acid molecules encoding such GIPR polypeptide sequences.

[0473] As used herein, the term “GIPR activity assay” (also referred to as a “GIPR functional assay”) means an assay that can be used to measure GIP or a GIP binding protein activity in a cellular setting. In some embodiments, the “activity assay” or “functional assay” can be a cAMP assay in GIPR-expressing cells, in which GIP can induce cAMP signal, and the activity of a GIP/GIPR binding protein could be measured in the presence/absence of GIP ligand, in which IC₅₀/EC₅₀ and degree of inhibition/activation can be obtained (Biochemical and Biophysical Research Communications (2002) 290:1420-1426). In other embodiments, the “activity assay” or “functional assay” can be an insulin secretion assay in pancreatic beta cells, in which GIP can induce glucose-dependent insulin secretion, and the activity of a GIP/GIPR binding protein could be measured in the presence/absence of GIP ligand, in which IC₅₀/EC₅₀ and degree of inhibition/activation can be obtained (Biochemical and Biophysical Research Communications (2002) 290:1420-1426).

[0474] As used herein, the term “GIPR binding assay” refers to an assay that can be used to measure binding of GIP to GIPR. In some embodiments, a “GIPR binding assay” can be an assay using Fluorometric Microvolume Assay Technology (“FMAT”) or Fluorescence-Activated Cell Sorting (“FACS”) that measures fluorescence-labeled GIP binding to GIPR expression cells, and GIP/GIPR binding protein's activity can be measured for displacing fluorescence-labeled GIP binding to GIPR expression cells. In other embodiments, a “GIPR binding assay” can be an assay that measures radioactive-labeled GIP binding to GIPR expression cells, and GIP/GIPR binding protein's activity can be measured for displacing radioactive labeled GIP binding to GIPR expression cells (Biochimica et Biophysica Acta (2001) 1547:143-155).

[0475] As used herein, a “GIPR antagonist” refers to a molecule that reduces or inhibits GIP activation of GIPR. Such antagonists include chemically synthesized small molecules and antigen binding proteins. In some embodiments, a GIPR antagonist may reduce or inhibit GIP activation of GIPR by preventing binding of GIP to GIPR.

[0476] As used herein, the term “compete,” when used in the context of antigen-binding proteins (e.g., antibodies), means competition between antigen-binding proteins is determined by an assay in which the tested antigen-binding protein (e.g., antibody or immunologically functional fragment thereof) prevents or inhibits specific binding of a reference antigen-binding protein to a common antigen (e.g., GIPR or a fragment thereof). Numerous types of competitive binding assays can be used, for example: solid phase direct or indirect radioimmunoassay (RIA); solid phase direct or indirect enzyme immunoassay (EIA); sandwich competition assay (see, e.g., Stahli et al., 1983, Methods in Enzymology 9:242-253); solid phase direct biotin-avidin EIA (see, e.g., Kirkland et al., 1986, J. Immunol. 137:3614-3619); solid phase direct labeled assay; solid phase direct labeled sandwich assay (see, e.g., Harlow and Lane, 1988, Antibodies, A Laboratory Manual, Cold Spring Harbor Press); solid phase direct label RIA using I-125 label (see, e.g., Morel et al., 1988, Molec. Immunol. 25:7-15); solid phase direct biotin-avidin EIA (see, e.g., Cheung, et al., 1990, Virology 176:546-552); and direct labeled RIA (Moldenhauer et al., 1990, Scand. J. Immunol. 32:77-82). Typically, such an assay involves the use of purified antigen bound to a solid surface or cells bearing either of these, an unlabeled test antigen binding protein, and a labeled reference antigen binding protein. Competitive inhibition is measured by determining the amount of label bound to the solid surface or cells in the presence of the test antigen binding protein. Usually, the test antigen-binding protein is present in excess. Commonly, when a competing antigen binding protein is present in excess, it will inhibit specific binding of a reference antigen binding protein to a common antigen by at least 40%, at least 45%, at least 50%, at least 55%, at least 60%, at least 65%, at least 70%, or at least 75%. In some instances, binding is inhibited by at least 80%, at least 85%, at least 90%, at least 95%, or at least 97%.

[0477] As used herein, the term “encoding” refers to a polynucleotide sequence encoding one or more amino acids. The term does not require a start or stop codon.

[0478] As used herein, the term “polynucleotide” or “nucleic acid” includes both single-stranded and double-stranded nucleotide polymers. The nucleotides comprising the polynucleotide can be ribonucleotides or deoxyribonucleotides or a modified form of either type of nucleotide. The modifications include base modifications such as bromouridine and inosine derivatives, ribose modifications such as 2′,3′-dideoxyribose, and internucleotide linkage modifications such as phosphorothioate, phosphorodithioate, phosphoroselenoate, phosphorodiselenoate, phosphoroanilothioate, phoshoraniladate, and phosphoroamidate.

[0479] As used herein, the term “oligonucleotide” means a polynucleotide comprising 200 or fewer nucleotides. In some embodiments, oligonucleotides are 10 to 60 bases in length. In other embodiments, oligonucleotides are 12, 13, 14, 15, 16, 17, 18, 19, or 20 to 40 nucleotides in length. Oligonucleotides may be single stranded or double stranded, e.g., for use in the construction of a mutant gene. Oligonucleotides may be sense or antisense oligonucleotides. An oligonucleotide can include a label, including a radiolabel, a fluorescent label, a hapten or an antigenic label, for detection assays. Oligonucleotides may be used, for example, as PCR primers, cloning primers, or hybridization probes.

[0480] Unless specified otherwise, the left-hand end of any single-stranded polynucleotide sequence discussed herein is the 5′ end; the left-hand direction of double-stranded polynucleotide sequences is referred to as the 5′ direction. The direction of 5′ to 3′ addition of nascent RNA transcripts is referred to as the transcription direction; sequence regions on the DNA strand having the same sequence as the RNA transcript that are 5′ to the 5′ end of the RNA transcript are referred to as “upstream sequences;” sequence regions on the DNA strand having the same sequence as the RNA transcript that are 3′ to the 3′ end of the RNA transcript are referred to as “downstream sequences.”

[0481] As used herein, the term “control sequence” refers to a polynucleotide sequence that can affect the expression and processing of coding sequences to which it is ligated. The nature of such control sequences may depend upon the host organism. In some embodiments, control sequences for prokaryotes may include a promoter, a ribosomal binding site, and a transcription termination sequence. For example, control sequences for eukaryotes may include promoters comprising one or a plurality of recognition sites for transcription factors, transcription enhancer sequences, and transcription termination sequences. “Control sequences” can include leader sequences and/or fusion partner sequences.

[0482] As used herein, the term “isolated nucleic acid molecule” refers to a single- or double-stranded polymer of deoxyribonucleotide or ribonucleotide bases read from the 5′ to the 3′ end, or an analog thereof, that has been separated from at least about 50 percent of polypeptides, peptides, lipids, carbohydrates, polynucleotides, or other materials with which the nucleic acid is naturally found when total nucleic acid is isolated from the source cells. In some embodiments, an isolated nucleic acid molecule is substantially free from any other contaminating nucleic acid molecules or other molecules that are found in the natural environment of the nucleic acid that would interfere with its use in polypeptide production or its therapeutic, diagnostic, prophylactic, or research use.

[0483] Polypeptides described herein can be engineered and/or produced using standard molecular biology methodology. For example, a nucleic acid sequence encoding a GIPR, which can comprise all or a portion of SEQ ID NOs: 1577, 1578, or 1579, can be isolated and/or amplified from genomic DNA, or cDNA using appropriate oligonucleotide primers. Primers can be designed based on the nucleic and amino acid sequences provided herein according to standard (RT)-PCR amplification techniques. The amplified GIPR nucleic acid can then be cloned into a suitable vector and characterized by DNA sequence analysis.

[0484] Oligonucleotides for use as probes in isolating or amplifying all or a portion of the amino acid sequences provided herein can be designed and generated using standard synthetic techniques, e.g., automated DNA synthesis apparatus, or can be isolated from a longer sequence of DNA.

[0485] As used herein, the term “host cell” means a cell that has been transformed with a nucleic acid sequence and thereby expresses a gene of interest. The term includes the progeny of the parent cell, whether or not the progeny is identical in morphology or in genetic make-up to the original parent cell, so long as the gene of interest is present. In some embodiments, the host cell is a mammalian, non-human host cell. Representative host cells include, but are not limited to, those hosts typically used for cloning and expression, including Escherichia coli strains TOP10F′, TOP10, DH10B, DH5a, HB101, W3110, BL21(DE3) and BL21 (DE3)pLysS, BLUESCRIPT (Stratagene), mammalian cell lines CHO, CHO-K1, HEK293, 293-EBNA pIN vectors (Van Heeke & Schuster, J. Biol. Chem. 264: 5503-5509 (1989); pET vectors (Novagen, Madison Wis.).

[0486] In some embodiments, host cells comprising vectors disclosed herein are provided. In some embodiments, a vector or nucleic acid is integrated into the host cell genome; in other embodiments, the vector is extra-chromosomal.

[0487] As used herein, the term “vector” means any molecule or entity (e.g., nucleic acid, plasmid, bacteriophage, or virus) used to transfer protein coding information into a host cell. A “vector” refers to a delivery vehicle that (a) promotes the expression of a polypeptide-encoding nucleic acid sequence; (b) promotes the production of the polypeptide therefrom; (c) promotes the transfection/transformation of target cells therewith; (d) promotes the replication of the nucleic acid sequence; (e) promotes stability of the nucleic acid; (f) promotes detection of the nucleic acid and/or transformed/transfected cells; and/or (g) otherwise imparts advantageous biological and/or physiochemical function to the polypeptide-encoding nucleic acid. A vector can be any suitable molecule or entity, including chromosomal, non-chromosomal, and synthetic nucleic acid vectors (a nucleic acid sequence comprising a suitable set of expression control elements). Non-limiting examples of vectors include derivatives of SV40, bacterial plasmids, phage DNA, baculovirus, yeast plasmids, vectors derived from combinations of plasmids and phage DNA, and viral nucleic acid (RNA or DNA) vectors.

[0488] As used herein, the term “expression vector” or “expression construct” refers to a vector that is suitable for transformation of a host cell and contains nucleic acid sequences that direct and/or control (in conjunction with the host cell) expression of one or more heterologous coding regions operatively linked thereto. An expression construct may include, but is not limited to, sequences that affect or control transcription, translation, and, if introns are present, affect RNA splicing of a coding region operably linked thereto.

[0489] In order to express a polypeptide provided herein, the appropriate coding sequence(s) can be cloned into a suitable vector and after introduction in a suitable host, the sequence can be expressed to produce the encoded polypeptide according to standard cloning and expression techniques, which are known in the art (e.g., as described in Sambrook, J., Fritsh, E. F., and Maniatis, T. Molecular Cloning: A Laboratory Manual 2nd, ed., Cold Spring Harbor Laboratory, Cold Spring Harbor Laboratory Press, Cold Spring Harbor, N.Y., 1989). In some embodiments, the present disclosure provides such vectors comprising a nucleic acid sequence encoding an amino acid sequence described herein.

[0490] A recombinant expression vector can be designed for expression of a protein in prokaryotic (e.g., E. coli) or eukaryotic cells (e.g., insect cells, using baculovirus expression vectors, yeast cells, or mammalian cells). Alternatively, a recombinant expression vector can be transcribed and translated in vitro, for example, using T7 promoter regulatory sequences and T7 polymerase and an in vitro translation system. In some embodiments, the vector contains a promoter upstream of the cloning site containing the nucleic acid sequence encoding the polypeptide. Examples of promoters, which can be switched on and off, include, but are not limited to, the lac promoter, the T7 promoter, the trc promoter, the tac promoter, and the trp promoter.

[0491] A vector can comprise or be associated with any suitable promoter, enhancer, and other expression-facilitating elements. Examples of such elements include strong expression promoters (e.g., a human CMV IE promoter/enhancer, an RSV promoter, SV40 promoter, SL3-3 promoter, MMTV promoter, or HIV LTR promoter, EF1alpha promoter, CAG promoter), effective poly (A) termination sequences, an origin of replication for plasmid product in E. coli, an antibiotic resistance gene as a selectable marker, and/or a convenient cloning site (e.g., a polylinker). Vectors also can comprise an inducible promoter as opposed to a constitutive promoter such as CMV IE. In some embodiments, a nucleic acid comprising an amino acid sequence described herein which is operably linked to a tissue-specific promoter which promotes expression of the sequence in a metabolically-relevant tissue, such as liver or pancreatic tissue, is provided.

[0492] In some embodiments, a nucleic acid can be positioned in and/or delivered to a host cell or host animal via a viral vector. Any suitable viral vector can be used in this capacity. A viral vector can comprise any number of viral polynucleotides, alone or in combination with one or more viral proteins, which facilitate delivery, replication, and/or expression of the nucleic acid of the present disclosure in a desired host cell. The viral vector can be a polynucleotide comprising all or part of a viral genome, a viral protein/nucleic acid conjugate, a virus-like particle (VLP), or an intact virus particle comprising viral nucleic acids and a GIPR polypeptide-encoding nucleic acid. A viral particle viral vector can comprise a wild-type viral particle or a modified viral particle. The viral vector can be a vector which requires the presence of another vector or wild-type virus for replication and/or expression (e.g., a viral vector can be a helper-dependent virus), such as an adenoviral vector amplicon. Typically, such viral vectors consist of a wild-type viral particle, or a viral particle modified in its protein and/or nucleic acid content to increase transgene capacity or aid in transfection and/or expression of the nucleic acid (examples of such vectors include the herpes virus/AAV amplicons). Typically, a viral vector is similar to and/or derived from a virus that normally infects humans. Suitable viral vector particles in this respect, include, but are not limited to, adenoviral vector particles (including any virus of or derived from a virus of the adenoviridae), adeno-associated viral vector particles (AAV vector particles) or other parvoviruses and parvoviral vector particles, papillomaviral vector particles, flaviviral vectors, alphaviral vectors, herpes viral vectors, pox virus vectors, retroviral vectors, including lentiviral vectors.

[0493] As used herein, “operably linked” means that the components to which the term is applied are in a relationship that allows them to carry out their inherent functions under suitable conditions. For example, a control sequence in a vector that is “operably linked” to a protein coding sequence is ligated thereto so that expression of the protein coding sequence is achieved under conditions compatible with the transcriptional activity of the control sequences.

[0494] As used herein, the terms “glucagon agonist” and “glucagon receptor (GCGR) agonist” are used interchangeably and refer to a molecule that mimics a biological activity of a glucagon molecule with respect to a glucagon receptor.

[0495] As used herein, the term “glucagon analog” refers to a molecule which elicits a biological activity similar to that of glucagon, when evaluated by art-known measures such as receptor binding assays or in vivo blood glucose assays as described, e.g., by Hargrove et al., Regulatory Peptides, 141:113-119 (2007), the disclosure of which is incorporated by reference herein. In some embodiments, the term “glucagon analog” refers to a peptide that has an amino acid sequence with 1, 2, 3, 4, 5, 6, 7 or 8 amino acid substitutions, insertions, deletions, or a combination of two or more of the preceding, when compared to the amino acid sequence of a glucagon. In some embodiments, the glucagon analog is glucagon-NH2. Glucagon analogs include the amidated forms, the acid form, the pharmaceutically acceptable salt form, and any other physiologically active form of the molecule. In some embodiments, a simple nomenclature is used to describe the glucagon receptor agonist, e.g., “glucagon (s2)” glucagon” or “glucagon S2s” designates an analog of glucagon wherein the naturally occurring L-serine at position 2 has been substituted with D-serine.

[0496] As used herein, the terms “GLP-1 agonist” and “GLP-1R agonist” are used interchangeably and refer to a molecule that mimics a biological activity of a GLP-1 molecule with respect to a GLP-1R.

[0497] As used herein, a “GIPR antagonist” refers to a molecule that partially or fully blocks, inhibits, or neutralizes a biological activity of a GIPR molecule.

[0498] As used herein, the term “pharmaceutically acceptable” refers to a species or component that is generally safe, non-toxic, and neither biologically nor otherwise undesirable for use in a subject.

[0499] As used herein, the term “pharmaceutically acceptable excipient” refers to a broad range of ingredients that may be combined with a polypeptide or molecule disclosed herein to prepare a pharmaceutically acceptable composition or formulation. Excipients include, for example, vehicles (e.g., solvents, dispersion media), coatings, isotonic and absorption delaying agents, diluents, colorants, glidants, disintegrants, flavoring agents, coatings, binders, sweeteners, lubricants, sorbents, and preservatives (e.g., antibacterial and antifungal agents).

[0500] As used herein, “substantially pure” means that the described species is the predominant species present, that is, on a molar basis it is more abundant than any other individual species in the same mixture. In some embodiments, a substantially pure molecule is a composition wherein the object species comprises at least 50% (on a molar basis) of all macromolecular species present. In other embodiments, a substantially pure composition will comprise at least 80%, at least 85%, at least 90%, at least 95%, at least 96%, at least 97%, at least 98%, or at least 99% of all macromolecular species present in the composition. In other embodiments, the object species is purified to essential homogeneity wherein contaminating species cannot be detected in the composition by conventional detection methods and thus the composition consists of a single detectable macromolecular species.

[0501] As used herein, the term “treating” refers to any indicia of success in the treatment or amelioration of an injury, pathology, or condition, including any objective or subjective parameter, such as, e.g., abatement, remission, diminishing of symptoms or making the injury, pathology, or condition more tolerable to the patient, slowing in the rate of degeneration or decline, making the final point of degeneration less debilitating, or improving a patient's physical or mental well-being. The treatment or amelioration of symptoms can be based on objective or subjective parameters, including, e.g., the results of a physical examination, neuropsychiatric exam, or a psychiatric evaluation.

[0502] As used herein, the term “therapeutically effective amount” refers to that amount of a polypeptide or molecule disclosed herein that elicits a desired biological or medical response in a cell, a tissue, a system, or a subject. The desired biological or medical response does not necessarily occur by administration of one dose, and may occur only after administration of a series of doses. Thus, a therapeutically effective amount may be administered in one or more administrations.

[0503] As used herein, the term “patient” or “subject” refers to humans and other mammals. The term “mammal” as used herein includes, for example, humans, non-human primates, cattle, sheep, goats, pigs, horses, cats, dog, rabbits, rodents (e.g., rats or mice), and monkeys. Human subjects include neonates, infants, juveniles, adults, and geriatric subjects. In some embodiments, the subject or patient is a human. In some embodiments, the subject or patient is an adult human.

### Glucagon Receptor Agonists

[0504] The present disclosure provides polypeptides that agonize a glucagon receptor (“GCGR”). Such polypeptides may be referred to as polypeptide agonists, glucagon receptor agonists, or GCGR agonists herein. The polypeptide agonists provided herein are glucagon analogs that mimic at least one biological activity of a glucagon molecule (SEQ ID NO: 1576) with respect to a glucagon receptor. Relative to native glucagon, such polypeptide agonists may possess one or more advantageous properties. For example, in some embodiments, a polypeptide agonist may exhibit improved stability relative to native glucagon.

[0505] Non-limiting examples of polypeptide agonists of the present disclosure are presented in Table 2A and Table 2B. Descriptions associated with the sequences are non-limiting and provided for the purpose of illustration, e.g., the N- and C-termini of the example sequences of Table 2A and Table 2B may be modified as described herein without being limited by the descriptions (e.g., OH; NH₂) provided. Illustratively, in some non-limiting embodiments, the C-termini of the disclosed sequences may be unmodified (e.g., terminating with an —OH), amidated (terminating with an —NH₂), or connected to another polypeptide sequence via, for example, an amide bond.

[0506] The following abbreviations for non-canonical amino acids are used in the Tables below.
[0507] Aad: L-α-aminoadipic acid
[0508] Aib: 2-aminoisobutyric acid
[0509] Azk: 6-azido-L-lysine
[0510] hPhe: homophenylalanine
[0511] 2-Nal: 2-naphthylalanine
[0512] Bip: L-4,4′-biphenylalanine
[0513] Cit: citrulline
[0514] 4-CiF: 4-chloro-L-phenylalanine
[0515] hSer: homoserine
[0516] Cha: β-cyclohexyl-L-alanine
[0517] Dpr: 2,3-diaminopropionic acid
[0518] 5-BrW: 5-bromo-L-tryptophan
[0519] BhTrp: L-beta-homotryptophan
[0520] 5-MeOW: 5-methoxy-L-tryptophan
[0521] 5-MeW: 5-methyl-L-tryptophan
[0522] 6-BrW: 6-bromo-L-tryptophan
[0523] 6-ClW: 6-chloro-L-tryptophan
[0524] 6-MeW: 6-methyl-L-tryptophan
[0525] 7-MeW: 7-methyl-L-tryptophan

TABLE 2A
Examples of GCG Receptor Agonist Sequences

| Description | Sequence | SEQ ID NO: |
|---|---|---|
| [s2, Aib16, K17, D24, 5- | HsQGT FTSDY SKYLD [Aib]KRAQ | 1587 |
| BrW25, L27, K28]-GCG-OH | DFVD[5-BrW] LLKT | |
| [s2, Aib16, 5- | HsQGT FTSDY SKYLD [Aib ]RRAQ | 1588 |
| BrW25, L27, K28]-GCG-OH | DFVQ[5-BrW] LLKT | |
| [s2, Aib16, K24, 5- | HsQGT FTSDY SKYLD [Aib]RRAQ | 1589 |
| BrW25, L27, D28]-GCG-OH | DFVK[5-BrW] LLDT | |
| [s2, Aib16, K17, Ala24, 5- | HsQGT FTSDY SKYLD [Aib]KRAQ | 1590 |
| BrW25, L27, K28]-GCG-OH | DFVA[5-BrW] LLKT | |
| [s2, Aib16, A24, 5- | HsQGT FTSDY SKYLD [Aib]RRAQ | 1591 |
| BrW25, K28]-GCG-OH | DFVA[5-BrW] LLKT | |
| [s2, Aib16, K17, K24, 5- | HsQGT FTSDY SKYLD [Aib]KRAQ | 1592 |
| BrW25, L27, D28]-GCG-OH | DFVK[5-BrW] LLDT | |
| [s2, Aib16, K17, E24, 5- | HsQGT FTSDY SKYLD [Aib]KRAQ | 1593 |
| BrW25, L27, K28]-GCG-OH | DFVE[5-BrW] LLKT | |
| [s2, Aib16, 2-Nal18, K24, 5- | HsQGT FTSDY SKYLD [Aib]R[2-Nal] | 1594 |
| BrW25, L27, D28]-GCG-OH | AQDFVK[5-BrW] LLDT | |
| [s2, Aib16, 2-Nal18, Ala24, | HsQGT FTSDY SKYLD [Aib]R[2-Nal] | 1595 |
| 5-BrW25, L27, K28]-GCG-OH | AQDFVA[5-BrW] LLKT | |
| [s2, Aib16, L27, K28]-GCG- | HsQGT FTSDY SKYLD [Aib]RRAQ | 1596 |
| OH | DFVQW LLKT | |
| [s2, Aib16, K24, L27, D28]- | HsQGT FTSDY SKYLD [Aib]RRAQ | 1597 |
| GCG-OH | DFVKW LLDT | |
| [s2, Aib16, K24, E27, S28]- | HsQGT FTSDY SKYLD [Aib]RRAQ | 1598 |
| GCG-OH | DFVKW LEST | |
| [s2, Aib16, K17, L27, K28]- | HsQGT FTSDY SKYLD [Aib]KRAQ | 1599 |
| GCG-OH | DFVQW LLKT | |
| [Y1, s2, Aib16, L27, K28]- | YsQGT FTSDY SKYLD [Aib]RRAQ | 1600 |
| GCG-OH | DFVQW LLKT | |
| [Y1, Aib2, Aib16, L27, K28]- | Y[Aib]QGT FTSDY SKYLD [Aib]RRAQ | 1601 |
| GCG-OH | DFVQW LLKT | |
| [t2, Aib16, L27, K28]-GCG- | HtQGT FTSDY SKYLD [Aib]RRAQ | 1602 |
| OH | DFVQW LLKT | |
| [s2, Aib16, A24, L27, K28]- | HsQGT FTSDY SKYLD [Aib]RRAQ | 1603 |
| GCG-OH | DFVAW LLKT | |
| [s2, Aib16, Aib24, L27, K28]- | HsQGT FTSDY SKYLD [Aib]RRAQ | 1604 |
| GCG-OH | DFV[Aib]W LLKT | |
| [s2, Aib16, Aib24, E27, K28]- | HsQGT FTSDY SKYLD [Aib]RRAQ | 1605 |
| GCG-OH | DFV[Aib]W LEKT | |
| [s2, Aib16, Y25, L27, K28]- | HsQGT FTSDY SKYLD [Aib]RRAQ | 1606 |
| GCG-OH | DFVQY LLKT | |
| [s2, Aib16, Bip18, L27, K28]- | HsQGT FTSDY SKYLD [Aib]R[Bip]AQ | 1607 |
| GCG-OH | DFVQW LLKT | |
| [s2, Aib16, 2-NaI18, L27, K28]- | HsQGT FTSDY SKYLD [Aib]R[2-Nal] | 1608 |
| GCG-OH | AQDFVQW LLKT | |
| [s2, Aib16, Cit17, L27, K28]- | HsQGT FTSDY SKYLD [Aib][Cit]RAQ | 1609 |
| GCG-OH | DFVQW LLKT | |
| [Aib16, Aad27, K28]-GCG- | HSQGT FTSDY SKYLD [Aib]RRAQ | 1610 |
| OH | DFVQW L[Aad]KT | |
| [s2, Aib16, Q17, L27, K28]- | HsQGT FTSDY SKYLD [Aib]QRAQ | 1611 |
| GCG-OH | DFVQW LLKT | |
| [s2, H7, Aib16, L27, K28, E29]- | HsQGT FHSDY SKYLD [Aib]RRAQ | 1612 |
| GCG-OH | DFVQW LLKE | |
| [s2, Aib16, K24, L27, D28, S29] | HsQGT FTSDY SKYLD [Aib]RRAQ | 1613 |
| -GCG-OH | DFVKW LLDS | |
| [Aib16, G24, L27, K28]-GCG- | HSQGT FTSDY SKYLD [Aib]RRAQ | 1614 |
| OH | DFVGW LLKT | |
| [s2, Aib16, D24, L27, K28]- | HsQGT FTSDY SKYLD [Aib]RRAQ | 1615 |
| GCG-OH | DFVDW LLKT | |
| [s2, Aib16, D24, L27, K28, E29] | HsQGT FTSDY SKYLD [Aib]RRAQ | 1616 |
| -GCG-OH | DFVDW LLKE | |
| [s2, Aib16, H24, L27, K28]- | HsQGT FTSDY SKYLD [Aib]RRAQ | 1617 |
| GCG-OH | DFVHW LLKT | |
| [s2, Aib16, K24, L27, K28]- | HsQGT FTSDY SKYLD [Aib]RRAQ | 1618 |
| GCG-OH | DFVKW LLKT | |
| [s2, Aib16, N24, L27, K28]- | HsQGT FTSDY SKYLD [Aib]RRAQ | 1619 |
| GCG-OH | DFVNW LLKT | |
| [s2, Aib16, T24, L27, K28]- | HsQGT FTSDY SKYLD [Aib]RRAQ | 1620 |
| GCG-OH | DFVTW LLKT | |
| [s2, Aib16, E24, L27, K28]- | HsQGT FTSDY SKYLD [Aib]RRAQ | 1621 |
| GCG-OH | DFVEW LLKT | |
| [s2, Aib16, L27, K28, D29]- | HsQGT FTSDY SKYLD [Aib]RRAQ | 1622 |
| GCG-OH | DFVQW LLKD | |
| [s2, Aib16, L27, K28, A29]- | HsQGT FTSDY SKYLD [Aib]RRAQ | 1623 |
| GCG-OH | DFVQW LLKA | |
| [s2, Aib16, BhTrp25, L27, K28] | HsQGT FTSDY SKYLD [Aib]RRAQ | 1624 |
| -GCG-OH | DFVQ[BhTrp] LLKT | |
| [Aib16, K17, K24, L27, D28]- | HSQGT FTSDY SKYLD [Aib]KRAQ | 1625 |
| GCG-OH | DFVKW LLDT | |
| [s2, Aib16, K17, D24, L27, K28] | HsQGT FTSDY SKYLD [Aib]KRAQ | 1626 |
| -GCG-OH | DFVDW LLKT | |
| [s2, Aib16, K17, E24, L27, K28] | HsQGT FTSDY SKYLD [Aib]KRAQ | 1627 |
| -GCG-OH | DFVEW LLKT | |
| [s2, Aib16, q24, L27, K28]- | HsQGT FTSDY SKYLD [Aib]RRAQ | 1747 |
| GCG-OH | DFVqW LLKT | |

TABLE 2B
Additional Examples of GCG Receptor Agonist Sequences

| Description | Sequence | SEQ ID NO: |
|---|---|---|
| [s2, Aib16, A17, L27, K28]- | HsQGTFTSDYSKYLD[Aib]ARAQDFVQ | 1748 |
| GCG-OH | WLLKT | |
| [Aib16, L27, K28]-GCG-OH | HSQGTFTSDYSKYLD[Aib]RRAQDFVQ | 1749 |
| | WLLKT | |
| [s2, Aib16, L27, Azk28]-GCG- | HsQGTFTSDYSKYLD[Aib]RRAQDFVQ | 1750 |
| OH | WLL[AzK]T | |
| [Y1, Aib2, L27, K28]-GCG-OH | Y[Aib]QGTFTSDYSKYLDSRRAQDFVQ | 1751 |
| | WLLKT | |
| [A16, K17, E21, E24, L27, K28, | HSQGTFTSDYSKYLDAKRAQEFVEWL | 1752 |
| S29]-GCG-OH | LKS | |
| [Aib16, E24, 5- | HSQGTFTSDYSKYLD[Aib]RRAQDFVE[ | 1753 |
| BrW25, L27, K28]-GCG-OH | 5-BrWILLKT | |
| [F1, s2, Aib16, L27, K28]- | FsQGTFTSDYSKYLD[Aib]RRAQDFVQ | 1754 |
| GCG-OH | WLLKT | |
| [s2, Aib16, 4-CIF20, L27, K28]- | HsQGTFTSDYSKYLD[Aib]RRA[4-C1- | 1755 |
| GCG-OH | F]DFVQWLLKT | |
| [s2, Aib16, 5- | HsQGTFTSDYSKYLD[Aib]RRAQDFVQ[ | 1756 |
| MeOW25, L27, K28]-GCG- | 5-MeOW]LLKT | |
| OH | | |
| [s2, Aib 16, 5- | HsQGTFTSDYSKYLD[Aib]RRAQDFVQ[ | 1757 |
| MeW25, L27, K28]-GCG-OH | 5-MeWILLKT | |
| [s2, Aib16, 6- | HsQGTFTSDYSKYLD[Aib]RRAQDFVQ[ | 1758 |
| BrW25, L27, K28]-GCG-OH | 6-BrWILLKT | |
| [s2, Aib16, 6- | HsQGTFTSDYSKYLD[Aib]RRAQDFVQ[ | 1759 |
| CIW25, L27, K28]-GCG-OH | 6-CIWILLKT | |
| [s2, Aib16, 6- | HsQGTFTSDYSKYLD[Aib]RRAQDFVQ[ | 1760 |
| MeW25, L27, K28]-GCG-OH | 6-MeWILLKT | |
| [s2, Aib16, 7- | HsQGTFTSDYSKYLD[Aib]RRAQDFVQ[ | 1761 |
| MeW25, L27, K28]-GCG-OH | 7-MeWILLKT | |
| [s2, Aib16, A18, K24, E27, D28, | HsQGTFTSDYSKYLD[Aib]RAAQDFVK | 1762 |
| S29]-GCG-NH2 | WLEDS | |
| [s2, Aib16, A20, A24, L27, K28] | HsQGTFTSDYSKYLD[Aib]RRAADFVA | 1763 |
| -GCG-OH | WLLKT | |
| [s2, Aib16, E27, K28]-GCG- | HsQGTFTSDYSKYLD[Aib]RRAQDFVQ | 1764 |
| OH | WLEKT | |
| [s2, Aib16, Q17, E27, K28]- | HsQGTFTSDYSKYLD[Aib]QRAQDFVQ | 1765 |
| GCG-OH | WLEKT | |
| [s2, Aib16, W22, L27, K28]- | HsQGTFTSDYSKYLD[Aib]RRAQDWVQ | 1766 |
| GCG-OH | WLLKT | |
| [Y1, s2, Aib16, K24, E27, D28, S | YsQGTFTSDYSKYLD[Aib]RRAQDFVK | 1767 |
| 29]-GCG-OH | WLEDS | |
| [Y1, s2, Aib16, Q17, K24, E27, | YsQGTFTSDYSKYLD[Aib]QRAQDFVK | 1768 |
| D28, S29]-GCG-OH | WLEDS | |
| [s2, Aib16, Cit21, L27, K28]- | HsQGTFTSDYSKYLD[Aib]RRAQ[Cit] | 1769 |
| GCG-OH | FVQWLLKT | |
| [s2, Aib16, L27, K28, E29]- | HsQGTFTSDYSKYLD[Aib]RRAQDFVQ | 1770 |
| GCG-OH | WLLKE | |
| [s2, Aib16, Cit18, L27, K28]- | HsQGTFTSDYSKYLD[Aib]R[Cit] | 1771 |
| GCG-OH | AQDFVQWLLKT | |
| [s2, Aib16, q20, L27, K28]- | HsQGTFTSDYSKYLD[Aib]RRAqDFVQ | 1772 |
| GCG-OH | WLLKT | |
| [s2, Aib16, d21, L27, K28]- | HsQGTFTSDYSKYLD[Aib]RRAQdFVQ | 1773 |
| GCG-OH | WLLKT | |
| [s2, H7, Aib16, L27, K28]- | HsQGTFHSDYSKYLD[Aib]RRAQDFVQ | 1774 |
| GCG-OH | WLLKT | |
| [s2, Aib16, R24, L27, K28]- | HsQGTFTSDYSKYLD[Aib]RRAQDFVR | 1775 |
| GCG-OH | WLLKT | |
| [s2, Aib16, F24, L27, K28]- | HsQGTFTSDYSKYLD[Aib]RRAQDFVF | 1776 |
| GCG-OH | WLLKT | |
| [s2, Aib16, L24, L27, K28]- | HsQGTFTSDYSKYLD[Aib]RRAQDFVL | 1777 |
| GCG-OH | WLLKT | |
| [s2, Aib16, S24, L27, K28]- | HsQGTFTSDYSKYLD[Aib]RRAQDFVS | 1778 |
| GCG-OH | WLLKT | |
| [s2, Aib16, Y24, L27, K28]- | HsQGTFTSDYSKYLD[Aib]RRAQDFVY | 1779 |
| GCG-OH | WLLKT | |
| [s2, Aib16, V24, L27, K28]- | HsQGTFTSDYSKYLD[Aib]RRAQDFVV | 1780 |
| GCG-OH | WLLKT | |
| [s2, Aib16, 124, L27, K28]- | HsQGTFTSDYSKYLD[Aib]RRAQDFVI | 1781 |
| GCG-OH | WLLKT | |
| [s2, Aib16, hSer24, L27, K28]- | HsQGTFTSDYSKYLD[Aib]RRAQDFV[h | 1782 |
| GCG-OH | Ser]WLLKT | |
| [s2, Aib16, Dpr24, L27, K28]- | HsQGTFTSDYSKYLD[Aib]RRAQDFV[D | 1783 |
| GCG-OH | pr]WLLKT | |
| [s2, Q16, L27, K28]-GCG-OH | HsQGTFTSDYSKYLDQRRAQDFVQWL | 1784 |
| | LKT | |
| [s2, Aib16, hSer20, L27, K28]- | HsQGTFTSDYSKYLD[Aib]RRA[hSer]DF | 1785 |
| GCG-OH | VQWLLKT | |
| [s2, Aib16, K18, E21, L27, K28] | HsQGTFTSDYSKYLD[Aib]RKAQEFVQ | 1786 |
| -GCG-OH | WLLKT | |
| [s2, Aib16, K24, E27, S28, E29]- | HsQGTFTSDYSKYLD[Aib]RRAQDFVK | 1787 |
| GCG-OH | WLESE | |
| [s2, Aib16, K24, L27, D28, E29] | HsQGTFTSDYSKYLD[Aib]RRAQDFVK | 1788 |
| -GCG-NH2 | WLLDE | |
| [s2, Aib16, K24, L27, D28, E29] | | |
| -GCG-OH | | |
| [s2, Aib16, L27, D28, K30, K31] | HsQGTFTSDYSKYLD[Aib]RRAQDFVQ | 1789 |
| -GCG-NH2 | WLLDTKK | |
| [s2, Aib16, Q17, A24, E27, 29, K | HsQGTFTSDYSKYLD[Aib]QRAQDFVA | 1790 |
| 28]-GCG-OH | WLEKE | |
| [s2, F7, Aib16, L27, K28, E29]- | HsQGTFFSDYSKYLD[Aib]RRAQDFVQ | 1791 |
| GCG-OH | WLLKE | |
| [s2, hPhe16, L27, K28]-GCG- | HsQGTFTSDYSKYLD[hPhe]RRAQDFVQ | 1792 |
| OH | WLLKT | |
| [s2, Aib16, E24, L27, D28, S29]- | HsQGTFTSDYSKYLD[Aib]RRAQDFVE | 1793 |
| GCG | WLLDS | |
| [s2, Aib16, Cha22, L27, K28]- | HsQGTFTSDYSKYLD[Aib]RRAQD[Cha] | 1794 |
| GCG-OH | VQWLLKT | |
| [s2, W10, Aib16, L27, K28]- | HsQGTFTSDWSKYLD[Aib]RRAQDFVQ | 1795 |
| GCG-OH | WLLKT | |
| [s2, Aib16, A24, E27, E29, K28] | HsQGTFTSDYSKYLD[Aib]RRAQDFVA | 1796 |
| -GCG-OH | WLEKE | |
| [s2, Aib16, K24, E27, D28, S29] | HsQGTFTSDYSKYLD[Aib]RRAQDFVK | 1797 |
| -GCG-OH | WLEDS | |
| [s2, Aib16, Nal18, K24, L27, D2 | HsQGTFTSDYSKYLD[Aib]R[2- | 1798 |
| 8]-GCG-OH | Nal]AQDFVKWLLDT | |
| [s2, Aib16, A24, L27, D28, S29] | HsQGTFTSDYSKYLD[Aib]RRAQDFVA | 1799 |
| -GCG | WLLDS | |
| [s2, Aib16, A24, L27, D28, E29] | HsQGTFTSDYSKYLD[Aib]RRAQDFVA | 1800 |
| -GCG | WLLDE | |
| [s2, Aib16, K17, A24, L27, K28, | HsQGTFTSDYSKYLD[Aib]KRAQDFVA | 1801 |
| E29]-GCG-OH | WLLKE | |
| [s2, Aib16, A24, L27, K28, E29] | HsQGTFTSDYSKYLD[Aib]RRAQDFVA | 1802 |
| -GCG-OH | WLLKE | |
| [s2, Aib16, D24, E27, E29, K28] | HsQGTFTSDYSKYLD[Aib]RRAQDFVD | 1803 |
| -GCG-OH | WLEKE | |
| [s2, Aib16, H20, K24, L27]- | HsQGTFTSDYSKYLD[Aib]RRAHDFVK | 1804 |
| GCG-NH2 | WLLNT | |
| [s2, Aib16, K24, L27, D28, S29] | HsQGTFTSDYSKYLD[Aib]RRAQDFVK | 1805 |
| -GCG-NH2 | WLLDS | |
| [s2, Aib16, D24, L27, K28, S29] | HsQGTFTSDYSKYLD[Aib]RRAQDFVD | 1806 |
| GCG-OH | WLLKS | |
| [s2, Aib16, E24, L27, K28, N29] | HsQGTFTSDYSKYLD[Aib]RRAQDFVE | 1807 |
| -GCG-OH | WLLKN | |
| [s2, Aib16, D24, 5- | HsQGTFTSDYSKYLD[Aib ]RRAQDFVD[ | 1808 |
| BrW25, L27, K28]-GCG-OH | 5-BrWILLKT | |
| [s2, Aib16, A24, 5- | HsQGTFTSDYSKYLD[Aib]RRAQDFVA[ | 1809 |
| BrW25, L27, K28, E29]-GCG- | 5-BrW]LLKE | |
| OH | | |
| [s2, Aib16, A24, 5- | HsQGTFTSDYSKYLD[Aib]RRAQDFVA[ | 1810 |
| BrW25, L27, K28, S29]-GCG- | 5-BrWILLKS | |
| OH | | |
| [s2, Aib16, K24, 5- | HsQGTFTSDYSKYLD[Aib]RRAQDFVK[ | 1811 |
| BrW25, L27, D28, E29]-GCG- | 5-BrWILLDE | |
| OH | | |
| [s2, Aib16, K24, 5- | HsQGTFTSDYSKYLD[Aib]RRAQDFVK[ | 1812 |
| BrW25, L27, D28, S29]-GCG- | 5-BrWILLDS | |
| OH | | |
| [s2, H7, Aib16, A24, 5- | HsQGTFHSDYSKYLD[Aib]RRAQDFVA[ | 1813 |
| BrW25, L27, K28]-GCG-OH | 5-BrWILLKT | |
| [s2, H7, Aib 16, A24, 5- | HsQGTFHSDYSKYLD[Aib]RRAQDFVA[ | 1814 |
| BrW25, L27, K28, S29]-GCG- | 5-BrWILLKS | |
| OH | | |
| [s2, Aib16, D24, 5- | HsQGTFTSDYSKYLD[Aib]RRAQDFVD[ | 1815 |
| BrW25, L27, K28, S29]-GCG- | 5-BrWILLKS | |
| OH | | |
| [s2, Aib16, E24, 5- | HsQGTFTSDYSKYLD[Aib]RRAQDFVE[ | 1816 |
| BrW25, L27, K28]-GCG-OH | 5-BrWILLKT | |
| [s2, Aib16, E24, 5- | HsQGTFTSDYSKYLD[Aib]RRAQDFVE[ | 1817 |
| BrW25, L27, K28, S29]-GCG- | 5-BrWILLKS | |
| OH | | |
| [s2, Aib16, K17, E24, L27, K28, | HsQGTFTSDYSKYLD[Aib]KRAQDFVE | 1818 |
| S29]-GCG-OH | WLLKS | |
| [s2, Aib16, K17, E24, L27, K28, | HsQGTFTSDYSKYLD[Aib]KRAQDFVE | 1819 |
| D29]-GCG-OH | WLLKD | |
| [s2, Aib16, K17, E24, E27, K28] | HsQGTFTSDYSKYLD[Aib]KRAQDFVE | 1820 |
| -GCG-OH | WLEKT | |
| [s2, Aib16, K17, E21, K24, L27, | HsQGTFTSDYSKYLD[Aib]KRAQEFVK | 1821 |
| E28]-GCG-OH | WLLET | |
| [s2, Aib16, K17, E21, K24, L27, | HsQGTFTSDYSKYLD[Aib]KRAQEFVK | 1822 |
| E28, S29]-GCG-OH | WLLES | |
| [s2, Aib16, K17, E24, L27, K28, | HsQGTFTSDYSKYLD[Aib]KRAQDFVE | 1823 |
| E29]-GCG-OH | WLLKE | |
| [s2, Aib16, K17, R20, E24, L27, | HsQGTFTSDYSKYLD[Aib]KRARDFVE | 1824 |
| K28, E29]-GCG-OH | WLLKE | |
| [s2, Aib16, K17, E21, E24, L27, | HsQGTFTSDYSKYLD[Aib]KRAQEFVE | 1825 |
| K28, S29]-GCG-OH | WLLKS | |
| [s2, Aib16, K17, E21, E24, L27, | HsQGTFTSDYSKYLD[Aib]KRAQEFVE | 1826 |
| K28, D29]-GCG-OH | WLLKD | |
| [s2, Aib16, K17, E21, E24, L27, | HsQGTFTSDYSKYLD[Aib]KRAQEFVE | 1827 |
| K28]-GCG(1-29)-OH | WLLKT | |
| [s2, Aib16, K17, R20, E21, E24, | HsQGTFTSDYSKYLD[Aib]KRAREFVE | 1828 |
| L27, K28, S29]-GCG(1-29)- | WLLKS | |
| OH | | |
| [s2, E16, K17, E21, E24, L27, K2 | HsQGTFTSDYSKYLDEKRAQEFVEWLL | 1829 |
| 8, S29]-GCG(1-29)-OH | KS | |
| [s2, Aib16, K17, E21, E24, L27, | HsQGTFTSDYSKYLD[Aib]KRAQEFVE | 1830 |
| K28, E29]-GCG(1-29)-NH2 | WLLKE | |
| [s2, Aib16, K17, E21, E24, L27, | HsQGTFTSDYSKYLD[Aib]KRAQEFVE | 1831 |
| E28, S29]-GCG(1-29) | WLLES | |
| [s2, Aib16, K17, E21, E24, L27, | HsQGTFTSDYSKYLD[Aib]KRAQEFVE | 1832 |
| E28, E29]-GCG(1-29) | WLLEE | |
| [s2, E15, Aib16, K17, E21, K24, | HsQGTFTSDYSKYLE[Aib]KRAQEFVK | 1833 |
| L27, E28, S29]-GCG(1-29)- | WLLES | |
| OH | | |
| [s2, E16, K17, R20, E21, E24, L2 | HsQGTFTSDYSKYLDEKRAREFVEWLL | 1834 |
| 7, K28, S29]-GCG(1-29)-OH | KS | |
| [s2, E3, Aib16, K17, E21, E24, L | HsEGTFTSDYSKYLD[Aib]KRAQEFVE | 1835 |
| 27, K28, S29]-GCG(1-29)-OH | WLLKS | |
| [s2, Aib16, K17, A18, E21, E24, | HsQGTFTSDYSKYLD[Aib]KAAQEFVE | 1836 |
| L27, K28, S29]-GCG(1-29)- | WLLKS | |
| OH | | |
| [s2, Aib16, K17, E20, E21, K24, | HsQGTFTSDYSKYLD[Aib]KRAEEFVK | 1837 |
| L27, E28, S29]-GCG(1-29)- | WLLES | |
| OH | | |
| [s2, Aib16, K17, E21, K24, L27, | HsQGTFTSDYSKYLD[Aib]KRAQEFVK | 1838 |
| A28, S29]-GCG(1-29)-OH | WLLAS | |
| [s2, E15, Aib16, K17, E21, E24, | HsQGT FTSDY SKYLE [Aib]KRAQ | 1839 |
| L27, K28, S29]-GCG(1-29)- | EFVEW LLKS | |
| OH | | |
| [s2, Aib16, a24, L27, K28]- | HsQGTFTSDYSKYLD[Aib]RRAQDFVa | 1840 |
| GCG-OH | WLLKT | |
| [K28]-GCG(1-29) | HSQGTFTSDYSKYLDSRRAQDFVKWL | 1859 |
| | MKT | |
| [K21]-GCG(1-29) | HSQGTFTSDYSKYLDSRRAQKFVKWL | 1860 |
| | MNT | |
| [Y1, s2, Aib16, Q17, E27, K28, | YsQGTFTSDYSKYLD[Aib]QRAQDFVQ | 1861 |
| E29]-GCG-OH | WLEKE | |
| [s2, Aib16, r17, L27, K28]- | HsQGTFTSDYSKYLD[Aib]rRAQDFVQ | 1862 |
| GCG-OH | WLLKT | |
| [s2, Aib16, Aad27, K28]-GCG- | HsQGT FTSDY SKYLD [Aib]RRAQ | 1879 |
| OH | DFVQW L[Aad]KT | |
| [s2, Aib16, G24, L27, K28]- | HsQGT FTSDY SKYLD [Aib]RRAQ | 1880 |
| GCG-OH | DFVGW LLKT | |
| [s2, Aib16, K17, K24, L27, D28] | HsQGT FTSDY SKYLD [Aib]KRAQ | 1881 |
| -GCG-OH | DFVKW LLDT | |

[0526] Provided herein is a polypeptide that agonizes a glucagon receptor (“GCGR”) comprising an amino acid sequence disclosed in Table 2A or Table 2B. In some embodiments, the polypeptide comprises an amino acid sequence disclosed in Table 2A. In some embodiments, the polypeptide comprises an amino acid sequence disclosed in Table 2B.

[0527] Provided herein is a polypeptide that agonizes a glucagon receptor (“GCGR”) that consists of an amino acid sequence disclosed in Table 2A or Table 2B. In some embodiments, the polypeptide consists of an amino acid sequence disclosed in Table 2A. In some embodiments, the polypeptide consists of an amino acid sequence disclosed in Table 2B.

[0528] Provided herein is a polypeptide comprising an amino acid sequence with between three and nine modifications relative to SEQ ID NO: 1576, wherein the modifications are selected from:
[0529] tyrosine and phenylalanine at position 1;
[0530] d-serine, 2-aminoisobutyric acid, and d-threonine at position 2;
[0531] glutamic acid at position 3;
[0532] histidine at position 7;
[0533] tryptophan at position 10;
[0534] glutamic acid at position 15;
[0535] 2-aminoisobutyric acid, glutamine, homophenylalanine, and glutamic acid at position 16;
[0536] lysine, citrulline, glutamine, and alanine at position 17;
[0537] 2-naphthylalanine, L-4,4′-biphenylalanine, alanine, citrulline, and lysine at position 18;
[0538] 4-chloro-L-phenylalanine, alanine, d-glutamine, homoserine, histidine, arginine, and glutamic acid at position 20;
[0539] glutamic acid, citrulline, and d-aspartic acid at position 21;
[0540] tryptophan and β-cyclohexyl-L-alanine at position 22;
[0541] aspartic acid, lysine, alanine, 2-aminoisobutyric acid, glycine, histidine, asparagine, threonine, d-glutamine, glutamic acid, arginine, phenylalanine, leucine, serine, tyrosine, valine, isoleucine, homoserine, and 2,3-diaminopropionic acid at position 24;
[0542] 5-bromo-L-tryptophan, tyrosine, L-beta-homotryptophan, 5-methoxy-L-tryptophan, 5-methyl-L-tryptophan, 6-bromo-L-tryptophan, 6-chloro-L-tryptophan, 6-methyl-L-tryptophan, and 7-bromo-L-tryptophan at position 25;
[0543] leucine, glutamic acid, and L-α-aminoadipic acid at position 27;
[0544] lysine, aspartic acid, serine, 6-azido-L-lysine, glutamic acid, and alanine at position 28;
[0545] glutamic acid, serine, aspartic acid, and alanine at position 29;
[0546] an additional amino acid at position 30, wherein the additional amino acid is lysine; and
[0547] an additional amino acid at position 31, wherein the additional amino acid is lysine.

[0548] In some embodiments, the amino acid sequence comprises between three and eight modifications relative to SEQ ID NO: 1576. In some embodiments, the amino acid sequence comprises between three and seven modifications relative to SEQ ID NO: 1576. In some embodiments, the amino acid sequence comprises between three and six modifications relative to SEQ ID NO: 1576. In some embodiments, the amino acid sequence comprises between three and five modifications relative to SEQ ID NO: 1576. In some embodiments, the amino acid sequence comprises three or four modifications relative to SEQ ID NO: 1576.

[0549] In some embodiments, the amino acid sequence comprises three modifications relative to SEQ ID NO: 1576.

[0550] In some embodiments, the modifications comprise a d-serine at position 2, a 2-aminoisobutyric acid at position 16, and between one and seven other modifications selected from:
[0551] tyrosine and phenylalanine at position 1;
[0552] glutamic acid at position 3;
[0553] histidine at position 7;
[0554] tryptophan at position 10;
[0555] glutamic acid at position 15;
[0556] lysine, citrulline, glutamine, and alanine at position 17;
[0557] 2-naphthylalanine, L-4,4′-biphenylalanine, alanine, citrulline, and lysine at position 18;
[0558] 4-chloro-L-phenylalanine, alanine, d-glutamine, homoserine, histidine, arginine, and glutamic acid at position 20;
[0559] glutamic acid, citrulline, and d-aspartic acid at position 21;
[0560] tryptophan and β-cyclohexyl-L-alanine at position 22;
[0561] aspartic acid, lysine, alanine, 2-aminoisobutyric acid, glycine, histidine, asparagine, threonine, d-glutamine, glutamic acid, arginine, phenylalanine, leucine, serine, tyrosine, valine, isoleucine, homoserine, and 2,3-diaminopropionic acid at position 24;
[0562] 5-bromo-L-tryptophan, tyrosine, L-beta-homotryptophan, 5-methoxy-L-tryptophan, 5-methyl-L-tryptophan, 6-bromo-L-tryptophan, 6-chloro-L-tryptophan, 6-methyl-L-tryptophan, and 7-bromo-L-tryptophan at position 25;
[0563] leucine, glutamic acid, and L-α-aminoadipic acid at position 27;
[0564] lysine, aspartic acid, serine, 6-azido-L-lysine, glutamic acid, and alanine at position 28;
[0565] glutamic acid, serine, aspartic acid, and alanine at position 29;
[0566] an additional amino acid at position 30, wherein the additional amino acid is lysine; and
[0567] an additional amino acid at position 31, wherein the additional amino acid is lysine.

[0568] In some embodiments, the modifications comprise a d-serine at position 2, a 2-aminoisobutyric acid at position 16, and between one and seven other modifications selected from:
[0569] lysine at position 17;
[0570] glutamic acid at position 21;
[0571] lysine, alanine, and glutamic acid at position 24;
[0572] 5-bromo-L-tryptophan at position 25;
[0573] leucine and glutamic acid at position 27;
[0574] lysine, aspartic acid, and glutamic acid at position 28; and
[0575] glutamic acid and serine at position 29.

[0576] In some embodiments, the modifications comprise a d-serine at position 2, a 2-aminoisobutyric acid at position 16, and between one and six other modifications selected from:
[0577] lysine at position 17;
[0578] glutamic acid at position 21;
[0579] lysine, alanine, and glutamic acid at position 24;
[0580] leucine and glutamic acid at position 27;
[0581] lysine, aspartic acid, and glutamic acid at position 28; and
[0582] glutamic acid and serine at position 29.

[0583] In some embodiments, the modifications comprise a d-serine at position 2, a 2-aminoisobutyric acid at position 16, and one or two other modifications selected from:
[0584] lysine at position 24; and
[0585] lysine and glutamic acid at position 28.

[0586] In some embodiments, the modifications comprise d-serine at position 2, 2-aminoisobutyric acid at position 16, and lysine at position 24. In some embodiments, the modifications comprise d-serine at position 2, 2-aminoisobutyric acid at position 16, lysine at position 24, and glutamic acid at position 28.

[0587] In some embodiments, the modifications comprise d-serine at position 2, 2-aminoisobutyric acid at position 16, and lysine at position 28.

[0588] In some embodiments, the modifications comprise tyrosine at position 1, d-serine at position 2, and 2-aminoisobutyric acid at position 16. In some embodiments, the modifications comprise phenylalanine at position 1, d-serine at position 2, and 2-aminoisobutyric acid at position 16.

[0589] In some embodiments, the modifications comprise d-serine at position 2, glutamic acid at position 3, and 2-aminoisobutyric acid at position 16.

[0590] In some embodiments, the modifications comprise d-serine at position 2, histidine at position 7, and 2-aminoisobutyric acid at position 16.

[0591] In some embodiments, the modifications comprise d-serine at position 2, tryptophan at position 10, and 2-aminoisobutyric acid at position 16.

[0592] In some embodiments, the modifications comprise d-serine at position 2, glutamic acid at position 15, and 2-aminoisobutyric acid at position 16.

[0593] In some embodiments, the modifications comprise d-serine at position 2, 2-aminoisobutyric acid at position 16, and lysine at position 17. In some embodiments, the modifications comprise d-serine at position 2, 2-aminoisobutyric acid at position 16, and citrulline at position 17. In some embodiments, the modifications comprise d-serine at position 2, 2-aminoisobutyric acid at position 16, and glutamine at position 17. In some embodiments, the modifications comprise d-serine at position 2, 2-aminoisobutyric acid at position 16, and alanine at position 17.

[0594] In some embodiments, the modifications comprise d-serine at position 2, 2-aminoisobutyric acid at position 16, and 2-naphthylalanine at position 18. In some embodiments, the modifications comprise d-serine at position 2, 2-aminoisobutyric acid at position 16, and L-4,4′-biphenylalanine at position 18. In some embodiments, the modifications comprise d-serine at position 2, 2-aminoisobutyric acid at position 16, and alanine at position 18. In some embodiments, the modifications comprise d-serine at position 2, 2-aminoisobutyric acid at position 16, and citrulline at position 18. In some embodiments, the modifications comprise d-serine at position 2, 2-aminoisobutyric acid at position 16, and lysine at position 18.

[0595] In some embodiments, the modifications comprise d-serine at position 2, 2-aminoisobutyric acid at position 16, and 4-chloro-L-phenylalanine at position 20. In some embodiments, the modifications comprise d-serine at position 2, 2-aminoisobutyric acid at position 16, and alanine at position 20. In some embodiments, the modifications comprise d-serine at position 2, 2-aminoisobutyric acid at position 16, and d-glutamine at position 20. In some embodiments, the modifications comprise d-serine at position 2, 2-aminoisobutyric acid at position 16, and homoserine at position 20. In some embodiments, the modifications comprise d-serine at position 2, 2-aminoisobutyric acid at position 16, and histidine at position 20. In some embodiments, the modifications comprise d-serine at position 2, 2-aminoisobutyric acid at position 16, and arginine at position 20. In some embodiments, the modifications comprise d-serine at position 2, 2-aminoisobutyric acid at position 16, and glutamic acid at position 20.

[0596] In some embodiments, the modifications comprise d-serine at position 2, 2-aminoisobutyric acid at position 16, and glutamic acid at position 21. In some embodiments, the modifications comprise d-serine at position 2, 2-aminoisobutyric acid at position 16, and citrulline at position 21. In some embodiments, the modifications comprise d-serine at position 2, 2-aminoisobutyric acid at position 16, and d-aspartic acid at position 21.

[0597] In some embodiments, the modifications comprise d-serine at position 2, 2-aminoisobutyric acid at position 16, and tryptophan at position 22. In some embodiments, the modifications comprise d-serine at position 2, 2-aminoisobutyric acid at position 16, and β-cyclohexyl-L-alanine at position 22.

[0598] In some embodiments, the modifications comprise d-serine at position 2, 2-aminoisobutyric acid at position 16, and aspartic acid at position 24. In some embodiments, the modifications comprise d-serine at position 2, 2-aminoisobutyric acid at position 16, and lysine at position 24. In some embodiments, the modifications comprise d-serine at position 2, 2-aminoisobutyric acid at position 16, and alanine at position 24. In some embodiments, the modifications comprise d-serine at position 2, 2-aminoisobutyric acid at position 16, and 2-aminoisobutyric acid at position 24. In some embodiments, the modifications comprise d-serine at position 2, 2-aminoisobutyric acid at position 16, and glycine at position 24. In some embodiments, the modifications comprise d-serine at position 2, 2-aminoisobutyric acid at position 16, and histidine at position 24. In some embodiments, the modifications comprise d-serine at position 2, 2-aminoisobutyric acid at position 16, and asparagine at position 24. In some embodiments, the modifications comprise d-serine at position 2, 2-aminoisobutyric acid at position 16, and threonine at position 24. In some embodiments, the modifications comprise d-serine at position 2, 2-aminoisobutyric acid at position 16, and d-glutamine at position 24. In some embodiments, the modifications comprise d-serine at position 2, 2-aminoisobutyric acid at position 16, and glutamic acid at position 24. In some embodiments, the modifications comprise d-serine at position 2, 2-aminoisobutyric acid at position 16, and arginine at position 24. In some embodiments, the modifications comprise d-serine at position 2, 2-aminoisobutyric acid at position 16, and phenylalanine at position 24. In some embodiments, the modifications comprise d-serine at position 2, 2-aminoisobutyric acid at position 16, and leucine at position 24. In some embodiments, the modifications comprise d-serine at position 2, 2-aminoisobutyric acid at position 16, and serine at position 24. In some embodiments, the modifications comprise d-serine at position 2, 2-aminoisobutyric acid at position 16, and tyrosine at position 24. In some embodiments, the modifications comprise d-serine at position 2, 2-aminoisobutyric acid at position 16, and valine at position 24. In some embodiments, the modifications comprise d-serine at position 2, 2-aminoisobutyric acid at position 16, and isoleucine at position 24. In some embodiments, the modifications comprise d-serine at position 2, 2-aminoisobutyric acid at position 16, and homoserine at position 24. In some embodiments, the modifications comprise d-serine at position 2, 2-aminoisobutyric acid at position 16, and 2,3-diaminopropionic acid at position 24.

[0599] In some embodiments, the modifications comprise d-serine at position 2, 2-aminoisobutyric acid at position 16, and 5-bromo-L-tryptophan at position 25. In some embodiments, the modifications comprise d-serine at position 2, 2-aminoisobutyric acid at position 16, and tyrosine at position 25. In some embodiments, the modifications comprise d-serine at position 2, 2-aminoisobutyric acid at position 16, and L-beta-homotryptophan at position 25. In some embodiments, the modifications comprise d-serine at position 2, 2-aminoisobutyric acid at position 16, and 5-methoxy-L-tryptophan at position 25. In some embodiments, the modifications comprise d-serine at position 2, 2-aminoisobutyric acid at position 16, and 5-methyl-L-tryptophan at position 25. In some embodiments, the modifications comprise d-serine at position 2, 2-aminoisobutyric acid at position 16, and 6-bromo-L-tryptophan at position 25. In some embodiments, the modifications comprise d-serine at position 2, 2-aminoisobutyric acid at position 16, and 6-chloro-L-tryptophan at position 25. In some embodiments, the modifications comprise d-serine at position 2, 2-aminoisobutyric acid at position 16, and 6-methyl-L-tryptophan at position 25. In some embodiments, the modifications comprise d-serine at position 2, 2-aminoisobutyric acid at position 16, and 7-bromo-L-tryptophan at position 25.

[0600] In some embodiments, the modifications comprise d-serine at position 2, 2-aminoisobutyric acid at position 16, and alanine at position 24.

[0601] In some embodiments, the modifications comprise d-serine at position 2, 2-aminoisobutyric acid at position 16, and leucine at position 27. In some embodiments, the modifications comprise d-serine at position 2, 2-aminoisobutyric acid at position 16, and glutamic acid at position 27. In some embodiments, the modifications comprise d-serine at position 2, 2-aminoisobutyric acid at position 16, and L-α-aminoadipic acid at position 27.

[0602] In some embodiments, the modifications comprise d-serine at position 2, 2-aminoisobutyric acid at position 16, and lysine at position 28. In some embodiments, the modifications comprise d-serine at position 2, 2-aminoisobutyric acid at position 16, and aspartic acid at position 28. In some embodiments, the modifications comprise d-serine at position 2, 2-aminoisobutyric acid at position 16, and serine at position 28. In some embodiments, the modifications comprise d-serine at position 2, 2-aminoisobutyric acid at position 16, and 6-azido-L-lysine at position 28. In some embodiments, the modifications comprise d-serine at position 2, 2-aminoisobutyric acid at position 16, and glutamic acid at position 28. In some embodiments, the modifications comprise d-serine at position 2, 2-aminoisobutyric acid at position 16, and alanine at position 28.

[0603] In some embodiments, the modifications comprise d-serine at position 2, 2-aminoisobutyric acid at position 16, and glutamic acid at position 29. In some embodiments, the modifications comprise d-serine at position 2, 2-aminoisobutyric acid at position 16, and serine at position 29. In some embodiments, the modifications comprise d-serine at position 2, 2-aminoisobutyric acid at position 16, and aspartic acid at position 29. In some embodiments, the modifications comprise d-serine at position 2, 2-aminoisobutyric acid at position 16, and alanine at position 29.

[0604] In some embodiments, the modifications comprise d-serine at position 2, 2-aminoisobutyric acid at position 16, and an additional amino acid at position 30, wherein the additional amino acid is lysine.

[0605] In some embodiments, the modifications comprise d-serine at position 2, 2-aminoisobutyric acid at position 16, and an additional amino acid at position 31, wherein the additional amino acid is lysine. In some embodiments, the modifications comprise d-serine at position 2, 2-aminoisobutyric acid at position 16, an additional amino acid at position 30, and an additional amino acid at position 31, wherein the additional amino acid at position 30 and the additional amino acid at position 31 are both lysine.

[0606] In some embodiments, the polypeptide is a linear polypeptide. In some embodiments, the polypeptide is a peptide. In some embodiments, the peptide is a linear peptide.

[0607] Provided herein is a polypeptide that agonizes a glucagon receptor (“GCGR”), wherein:
[0608] the polypeptide comprises at least 25 amino acids, wherein the polypeptide comprises 5-bromo-tryptophan at position 25; and
[0609] the polypeptide has at least 79% sequence identity to the amino acid sequence of SEQ ID NO: 1587.

[0610] In some embodiments, the polypeptide is a linear polypeptide. In some embodiments, the polypeptide is a peptide. In some embodiments, the peptide is a linear peptide.

[0611] In some embodiments, the polypeptide comprises at least 27 (e.g., at least 27, at least 28, at least 29; 27, 28, 29) amino acids. In some embodiments, the polypeptide comprises at least 28 amino acids. In some embodiments, the polypeptide comprises at least 29 amino acids.

[0612] In some embodiments, the polypeptide comprises 29 amino acids.

[0613] In some embodiments, the polypeptide has at least 82% sequence identity to the amino acid sequence of SEQ ID NO: 1587. In some embodiments, the polypeptide has at least 86% sequence identity to the amino acid sequence of SEQ ID NO: 1587. In some embodiments, the polypeptide has at least 89% sequence identity to the amino acid sequence of SEQ ID NO: 1587. In some embodiments, the polypeptide has at least 93% sequence identity to the amino acid sequence of SEQ ID NO: 1587. In some embodiments, the polypeptide has at least 96% sequence identity to the amino acid sequence of SEQ ID NO: 1587.

[0614] In some embodiments, the polypeptide comprises an amino acid sequence having at most six (e.g., zero, one, two, three, four, five or six) amino acid modifications relative to SEQ ID NO: 1587. In some embodiments, the polypeptide comprises an amino acid sequence having at most five amino acid modifications relative to SEQ ID NO: 1587. In some embodiments, the polypeptide comprises an amino acid sequence having at most four amino acid modifications relative to SEQ ID NO: 1587. In some embodiments, the polypeptide comprises an amino acid sequence having at most three amino acid modifications relative to SEQ ID NO: 1587. In some embodiments, the polypeptide comprises an amino acid sequence having at most two amino acid modifications relative to SEQ ID NO: 1587. In some embodiments, the polypeptide comprises an amino acid sequence having at most one amino acid modification relative to SEQ ID NO: 1587.

[0615] In some embodiments, each amino acid modification, if any, is an amino acid substitution. In some embodiments, each amino acid modification, if any, is a conservative amino acid substitution. In some embodiments, each amino acid modification, if any, is a conservative amino acid substitution listed in Table 1.

[0616] In some embodiments, the at most one amino acid modification is an amino acid deletion. In some embodiments, the at most one amino acid modification is an amino acid addition.

[0617] In some embodiments, the polypeptide comprises one or more (e.g., two or more, three or more, four or more, five or more; one, two, three, four, five, or six) of: d-serine at position 2; 2-aminoisobutyric acid at position 16; lysine at position 17; β-(2-naphthyl)-L-alanine at position 18; aspartic acid, lysine, alanine, or glutamic acid at position 24; and leucine at position 27. In some embodiments, the polypeptide comprises d-serine at position 2. In some embodiments, the polypeptide comprises 2-aminoisobutyric acid at position 16. In some embodiments, the polypeptide comprises lysine at position 17. In some embodiments, the polypeptide comprises β-(2-naphthyl)-L-alanine at position 18. In some embodiments, the polypeptide comprises aspartic acid, lysine, alanine, or glutamic acid at position 24. In some embodiments, the polypeptide comprises aspartic acid at position 24. In some embodiments, the polypeptide comprises lysine at position 24. In some embodiments, the polypeptide comprises alanine at position 24. In some embodiments, the polypeptide comprises glutamic acid at position 24. In some embodiments, the polypeptide comprises leucine at position 27.

[0618] In some embodiments, the polypeptide comprises lysine or aspartic acid at position 28. In some embodiments, the polypeptide comprises lysine at position 28. In some embodiments, the polypeptide comprises aspartic acid at position 28.

[0619] In some embodiments, the polypeptide comprises d-serine at position 2 and 2-aminoisobutyric acid at position 16. In some embodiments, the polypeptide comprises d-serine at position 2, 2-aminoisobutyric acid at position 16, and leucine at position 27. In some embodiments, the polypeptide further comprises lysine or aspartic acid at position 28. In some embodiments, the polypeptide further comprises lysine at position 28. In some embodiments, the polypeptide comprises further aspartic acid at position 28.

[0620] In some embodiments, the polypeptide comprises d-serine at position 2, 2-aminoisobutyric acid at position 16, leucine at position 27, and lysine or aspartic acid at position 28. In some embodiments, the polypeptide comprises d-serine at position 2, 2-aminoisobutyric acid at position 16, leucine at position 27, and lysine at position 28. In some embodiments, the polypeptide comprises d-serine at position 2, 2-aminoisobutyric acid at position 16, leucine at position 27, and aspartic acid at position 28.

[0621] In some embodiments, the polypeptide comprises d-serine at position 2, 2-aminoisobutyric acid at position 16, leucine at position 27, and lysine at position 28. In some embodiments, the polypeptide comprises d-serine at position 2, 2-aminoisobutyric acid at position 16, aspartic acid at position 24, leucine at position 27, and lysine at position 28.

[0622] In some embodiments, the polypeptide comprises d-serine at position 2, 2-aminoisobutyric acid at position 16, lysine at position 24, leucine at position 27, and aspartic acid at position 28.

[0623] In some embodiments, the polypeptide comprises d-serine at position 2, 2-aminoisobutyric acid at position 16, aspartic acid at position 24, leucine at position 27, and lysine at position 28.

[0624] In some embodiments, the polypeptide comprises d-serine at position 2, 2-aminoisobutyric acid at position 16, alanine at position 24, and lysine at position 28. In some embodiments, the polypeptide comprises d-serine at position 2, 2-aminoisobutyric acid at position 16, lysine at position 17, alanine at position 24, leucine at position 27, and lysine at position 28. In some embodiments, the polypeptide comprises d-serine at position 2, 2-aminoisobutyric acid at position 16, lysine at position 17, glutamic acid at position 24, leucine at position 27, and lysine at position 28.

[0625] In some embodiments, the polypeptide comprises d-serine at position 2, 2-aminoisobutyric acid at position 16, β-(2-naphthyl)-L-alanine at position 18, lysine or alanine at position 24, leucine at position 27, and lysine or aspartic acid at position 28. In some embodiments, the polypeptide comprises d-serine at position 2, 2-aminoisobutyric acid at position 16, β-(2-naphthyl)-L-alanine at position 18, lysine at position 24, leucine at position 27, and aspartic acid at position 28. In some embodiments, the polypeptide comprises d-serine at position 2, 2-aminoisobutyric acid at position 16, β-(2-naphthyl)-L-alanine at position 18, alanine at position 24, leucine at position 27, and lysine at position 28.

[0626] In some embodiments, the polypeptide comprises the amino acid sequence of any one of SEQ ID NOs: 1587-1595. In some embodiments, the polypeptide comprises the amino acid sequence of SEQ ID NO: 1587. In some embodiments, the polypeptide comprises the amino acid sequence of SEQ ID NO: 1588. In some embodiments, the polypeptide comprises the amino acid sequence of SEQ ID NO: 1589. In some embodiments, the polypeptide comprises the amino acid sequence of SEQ ID NO: 1590. In some embodiments, the polypeptide comprises the amino acid sequence of SEQ ID NO: 1591. In some embodiments, the polypeptide comprises the amino acid sequence of SEQ ID NO: 1592. In some embodiments, the polypeptide comprises the amino acid sequence of SEQ ID NO: 1593. In some embodiments, the polypeptide comprises the amino acid sequence of SEQ ID NO: 1594. In some embodiments, the polypeptide comprises the amino acid sequence of SEQ ID NO: 1595.

[0627] In some embodiments, the polypeptide consists of the amino acid sequence of any one of SEQ ID NOs: 1587-1595. In some embodiments, the polypeptide consists of the amino acid sequence of SEQ ID NO: 1587. In some embodiments, the polypeptide consists of the amino acid sequence of SEQ ID NO: 1588. In some embodiments, the polypeptide consists of the amino acid sequence of SEQ ID NO: 1589. In some embodiments, the polypeptide consists of the amino acid sequence of SEQ ID NO: 1590. In some embodiments, the polypeptide consists of the amino acid sequence of SEQ ID NO: 1591. In some embodiments, the polypeptide consists of the amino acid sequence of SEQ ID NO: 1592. In some embodiments, the polypeptide consists of the amino acid sequence of SEQ ID NO: 1593. In some embodiments, the polypeptide consists of the amino acid sequence of SEQ ID NO: 1594. In some embodiments, the polypeptide consists of the amino acid sequence of SEQ ID NO: 1595.

[0628] In some embodiments, the polypeptide agonizes human GCGR (“hGCGR”). In some embodiments, the hGCGR comprises the amino acid sequence of SEQ ID NO: 1576.

[0629] In some embodiments, the polypeptide has a hGCGR EC₅₀ of less than or equal to 1 nM.

[0630] In some embodiments, the polypeptide has a hGCGR EC₅₀ of less than or equal to 500 pM (e.g., less than or equal to 475 pM, less than or equal to 450 pM, less than or equal to 425 pM, less than or equal to 400 pM, less than or equal to 375 pM, less than or equal to 350 pM, less than or equal to 325 pM, less than or equal to 300 pM, less than or equal to 275 pM, less than or equal to 250 pM, less than or equal to 225 pM, less than or equal to 200 pM, less than or equal to 175 pM, less than or equal to 150 pM, less than or equal to 125 pM, less than or equal to 100 pM). In some embodiments, the hGCGR EC₅₀ is measured in a functional assay described in “EXAMPLE 1: GCG Receptor Agonist Activity.”

[0631] In some embodiments, the polypeptide has a hGCGR EC₅₀ of 50 pM, 55 pM, 60 pM, 65 pM, 70 pM, 75 pM, 80 pM, 85 pM, 90 pM, 95 pM, 100 pM, 105 pM, 110 pM, 115 pM, 120 pM, 125 pM, 130 pM, 135 pM, 140 pM, 145 pM, 150 pM, 155 pM, 200 pM, 205 pM, 210 pM, 215 pM, 220 pM, 225 pM, 230 pM, 235 pM, 240 pM, 245 pM, 250 pM, 255 pM, 260 pM, 265 pM, 270 pM, 275 pM, 280 pM, 285 pM, 290 pM, 295 pM, 300 pM, 305 pM, 310 pM, 315 pM, 320 pM, 325 pM, 330 pM, 335 pM, 340 pM, 345 pM, 350 pM, 355 pM, 360 pM, 365 pM, 370 pM, 375 pM, 380 pM, 385 pM, 390 pM, 395 pM, 400 pM, 405 pM, 410 pM, 415 pM, 420 pM, 425 pM, 430 pM, 435 pM, 440 pM, 445 pM, 450 pM, 455 pM, 460 pM, 465 pM, 470 pM, 475 pM, 480 pM, 485 pM, 490 pM, 495 pM, or 500 pM. In some embodiments, the hGCGR EC₅₀ is measured in a functional assay described in “EXAMPLE 1: GCG Receptor Agonist Activity.”

[0632] In some embodiments, the polypeptide has a human glucagon-like peptide-1 receptor (“hGLP-1R”) EC₅₀:hGCGR EC₅₀ ratio of at least 30:1. In some embodiments, the polypeptide has a human glucagon-like peptide-1 receptor (“hGLP-1R”) EC₅₀:hGCGR EC₅₀ ratio of at least 40:1. In some embodiments, the polypeptide has a hGLP-1R EC₅₀:hGCGR EC₅₀ ratio of at least 50:1. In some embodiments, the polypeptide has a hGLP-1R EC₅₀:hGCGR EC₅₀ ratio of at least 60:1. In some embodiments, the polypeptide has a hGLP-1R EC₅₀:hGCGR EC₅₀ ratio of at least 70:1. In some embodiments, the polypeptide has a hGLP-1R EC₅₀:hGCGR EC₅₀ ratio of at least 80:1. In some embodiments, the polypeptide has a hGLP-1R EC₅₀:hGCGR EC₅₀ ratio of at least 90:1. In some embodiments, the polypeptide has a hGLP-1R EC₅₀:hGCGR EC₅₀ ratio of at least 100:1 In some embodiments, the polypeptide has a hGLP-1R EC₅₀:hGCGR EC₅₀ ratio of at least 150:1. In some embodiments, the polypeptide has a hGLP-1R EC₅₀:hGCGR EC₅₀ ratio of at least 200:1. In some embodiments, the polypeptide has a hGLP-1R EC₅₀:hGCGR EC₅₀ ratio of at least 250:1. In some embodiments, the polypeptide has a hGLP-1R EC₅₀:hGCGR EC₅₀ ratio of at least 300:1. In some embodiments, the polypeptide has a hGLP-1R EC₅₀:hGCGR EC₅₀ ratio of at least 350:1. In some embodiments, the polypeptide has a hGLP-1R EC₅₀:hGCGR EC₅₀ ratio of at least 400:1. In some embodiments, the polypeptide has a hGLP-1R EC₅₀:hGCGR EC₅₀ ratio of at least 450:1. In some embodiments, the polypeptide has a hGLP-1R EC₅₀:hGCGR EC₅₀ ratio of at least 500:1. In some embodiments, the polypeptide has a hGLP-1R EC₅₀:hGCGR EC₅₀ ratio of at least 550:1. In some embodiments, the polypeptide has a hGLP-1R EC₅₀:hGCGR EC₅₀ ratio of at least 650:1. In some embodiments, the polypeptide has a hGLP-1R EC₅₀:hGCGR EC₅₀ ratio of at least 700:1. In some embodiments, the polypeptide has a hGLP-1R EC₅₀:hGCGR EC₅₀ ratio of at least 750:1. In some embodiments, the polypeptide has a hGLP-1R EC₅₀:hGCGR EC₅₀ ratio of at least 800:1. In some embodiments, the polypeptide has a hGLP-1R EC₅₀:hGCGR EC₅₀ ratio of at least 850:1. In some embodiments, the polypeptide has a hGLP-1R EC₅₀:hGCGR EC₅₀ ratio of at least 900:1. In some embodiments, the polypeptide has a hGLP-1R EC₅₀:hGCGR EC₅₀ ratio of at least 950:1. In some embodiments, the polypeptide has a hGLP-1R EC₅₀:hGCGR EC₅₀ ratio of at least 1000:1. In some embodiments, the hGCGR EC₅₀ is measured in a functional assay described in “EXAMPLE 1: GCG Receptor Agonist Activity” and the hGLP-1R EC₅₀ is measured in a functional assay described in “EXAMPLE 2: GLP-1 Receptor Agonist Activity.”

[0633] In some embodiments, the polypeptide has a hGLP-1R EC₅₀:hGCGR EC₅₀ ratio of 30:1, 40:1, 45:1, 50:1, 55:1, 60:1, 65:1, 70:1, 75:1, 80:1, 85:1, 90:1, 95:1, 100:1, 125:1, 150:1, 175:1, 200:1, 225:1, 250:1, 275:1, 300:1, 325:1, 350:1, 375:1, 400:1, 425:1, 450:1, 475:1, 500:1, 525:1, 550:1, 575:1, 600:1, 625:1, 650:1, 675:1, 700:1, 725:1, 750:1, 775:1, 800:1, 825:1, 850:1, 875:1, 900:1, 925:1, 950:1, 975:1, or 1000:1. In some embodiments, the hGCGR EC₅₀ is measured in a functional assay described in “EXAMPLE 1: GCG Receptor Agonist Activity” and the hGLP-1R EC₅₀ is measured in a functional assay described in “EXAMPLE 2: GLP-1 Receptor Agonist Activity.”

[0634] Provided herein is a polypeptide that agonizes a GCGR, wherein:
[0635] the polypeptide comprises at least 28 amino acids, wherein the polypeptide comprises 2-aminoisobutyric acid at position 16 and lysine, serine, or aspartic acid at position 28; and
[0636] the polypeptide has at least 89% sequence identity to the amino acid sequence of SEQ ID NO: 1596.

[0637] In some embodiments, the polypeptide comprises lysine at position 28.

[0638] In some embodiments, the polypeptide comprises serine at position 28.

[0639] In some embodiments, the polypeptide comprises aspartic acid at position 28.

[0640] In some embodiments, the polypeptide is a linear polypeptide. In some embodiments, the polypeptide is a peptide. In some embodiments, the peptide is a linear peptide.

[0641] In some embodiments, the polypeptide comprises 29 amino acids.

[0642] In some embodiments, the polypeptide has at least 93% sequence identity to the amino acid sequence of SEQ ID NO: 1596. In some embodiments, the polypeptide has at least 96% sequence identity to the amino acid sequence of SEQ ID NO: 1596.

[0643] In some embodiments, the polypeptide comprises an amino acid sequence having at most three (e.g., zero, one, two, three) amino acid modifications relative to SEQ ID NO: 1596. In some embodiments, the polypeptide comprises an amino acid sequence having at most two amino acid modifications relative to SEQ ID NO: 1596. In some embodiments, the polypeptide comprises an amino acid sequence having at most one amino acid modification relative to SEQ ID NO: 1596.

[0644] In some embodiments, each amino acid modification, if any, is an amino acid substitution. In some embodiments, each amino acid modification, if any, is a conservative amino acid substitution. In some embodiments, each amino acid modification, if any, is a conservative amino acid substitution listed in Table 1.

[0645] In some embodiments, the at most one amino acid modification is an amino acid deletion. In some embodiments, the at most one amino acid modification is an amino acid addition.

[0646] In some embodiments, the polypeptide comprises one or more (e.g., two or more, three of more, four or more, five or more; one, two, three, four, or five) of the following: tyrosine at position 1; d-serine, d-threonine, or 2-aminoisobutyric acid at position 2; histidine at position 7; lysine, citrulline, or glutamine at position 17; β-(2-naphthyl)-L-alanine or β-(4,4′-biphenyl)alanine at position 18; lysine, alanine, asparagine, glutamic acid, glycine, aspartic acid, histidine, threonine, or 2-aminoisobutyric acid at position 24; tyrosine, 5-bromo-tryptophan, or L-beta-homotryptophan at position 25; leucine, glutamic acid, or α-aminoadipic acid at position 27; and alanine, aspartic acid, glutamic acid, or serine at position 29.

[0647] In some embodiments, the polypeptide comprises tyrosine at position 1.

[0648] In some embodiments, the polypeptide comprises d-serine, d-threonine, or 2-aminoisobutyric acid at position 2. In some embodiments, the polypeptide comprises d-serine at position 2. In some embodiments, the polypeptide comprises d-threonine at position 2. In some embodiments, the polypeptide comprises 2-aminoisobutyric acid at position 2.

[0649] In some embodiments, the polypeptide comprises histidine at position 7.

[0650] In some embodiments, the polypeptide comprises lysine, citrulline, or glutamine at position 17. In some embodiments, the polypeptide comprises lysine at position 17. In some embodiments, the polypeptide comprises citrulline at position 17. In some embodiments, the polypeptide comprises glutamine at position 17.

[0651] In some embodiments, the polypeptide comprises β-(2-naphthyl)-L-alanine or β-(4,4′-biphenyl)alanine at position 18. In some embodiments, the polypeptide comprises β-(2-naphthyl)-L-alanine at position 18. In some embodiments, the polypeptide comprises β-(4,4′-biphenyl)alanine at position 18.

[0652] In some embodiments, the polypeptide comprises lysine, alanine, asparagine, glutamic acid, glycine, aspartic acid, histidine, threonine, or 2-aminoisobutyric acid at position 24. In some embodiments, the polypeptide comprises lysine at position 24. In some embodiments, the polypeptide comprises alanine at position 24. In some embodiments, the polypeptide comprises asparagine at position 24. In some embodiments, the polypeptide comprises glutamic acid at position 24. In some embodiments, the polypeptide comprises glycine at position 24. In some embodiments, the polypeptide comprises aspartic acid at position 24. In some embodiments, the polypeptide comprises histidine at position 24. In some embodiments, the polypeptide comprises threonine at position 24. In some embodiments, the polypeptide comprises 2-aminoisobutyric acid at position 24.

[0653] In some embodiments, the polypeptide comprises tyrosine, 5-bromo-tryptophan, or L-beta-homotryptophan at position 25. In some embodiments, the polypeptide comprises tyrosine at position 25. In some embodiments, the polypeptide comprises 5-bromo-tryptophan at position 25. In some embodiments, the polypeptide comprises L-beta-homotryptophan at position 25.

[0654] In some embodiments, the polypeptide comprises leucine, glutamic acid, or α-aminoadipic acid at position 27. In some embodiments, the polypeptide comprises leucine at position 27. In some embodiments, the polypeptide comprises glutamic acid at position 27. In some embodiments, the polypeptide comprises α-aminoadipic acid at position 27.

[0655] In some embodiments, the polypeptide comprises alanine, aspartic acid, glutamic acid, or serine at position 29. In some embodiments, the polypeptide comprises alanine at position 29. In some embodiments, the polypeptide comprises aspartic acid at position 29. In some embodiments, the polypeptide comprises glutamic acid at position 29. In some embodiments, the polypeptide comprises serine at position 29.

[0656] In some embodiments, the polypeptide comprises d-serine at position 2, 2-aminoisobutyric acid at position 16, leucine at position 27, and lysine at position 28.

[0657] In some embodiments, the polypeptide comprises d-serine at position 2, 2-aminoisobutyric acid at position 16, lysine at position 17, leucine at position 27, and lysine at position 28.

[0658] In some embodiments, the polypeptide comprises d-serine at position 2, 2-aminoisobutyric acid at position 16, lysine, alanine, asparagine, glutamic acid, glycine, aspartic acid, histidine, threonine, or 2-aminoisobutyric acid at position 24, and lysine at position 28.

[0659] In some embodiments, the polypeptide comprises d-serine at position 2, 2-aminoisobutyric acid at position 16, tyrosine, 5-bromo-tryptophan, or L-beta-homotryptophan at position 25, leucine at position 27, and lysine at position 28.

[0660] In some embodiments, the polypeptide comprises d-serine at position 2, 2-aminoisobutyric acid at position 16, lysine at position 28, and alanine, aspartic acid, glutamic acid, or serine at position 29.

[0661] In some embodiments, the polypeptide agonizes human GCGR (“hGCGR”). In some embodiments, the hGCGR comprises the amino acid sequence of SEQ ID NO: 1576.

[0662] In some embodiments, the polypeptide has a hGCGR EC₅₀ of less than or equal to 1 nM.

[0663] In some embodiments, the polypeptide has a hGCGR EC₅₀ of less than or equal to 500 pM (e.g., less than or equal to 475 pM, less than or equal to 450 pM, less than or equal to 425 pM, less than or equal to 400 pM, less than or equal to 375 pM, less than or equal to 350 pM, less than or equal to 325 pM, less than or equal to 300 pM, less than or equal to 275 pM, less than or equal to 250 pM, less than or equal to 225 pM, less than or equal to 200 pM, less than or equal to 175 pM, less than or equal to 150 pM, less than or equal to 125 pM, less than or equal to 100 pM). In some embodiments, the hGCGR EC₅₀ is measured in a functional assay described in “EXAMPLE 1: GCG Receptor Agonist Activity.”

[0664] In some embodiments, the polypeptide has a hGCGR EC₅₀ of 50 pM, 55 pM, 60 pM, 65 pM, 70 pM, 75 pM, 80 pM, 85 pM, 90 pM, 95 pM, 100 pM, 105 pM, 110 pM, 115 pM, 120 pM, 125 pM, 130 pM, 135 pM, 140 pM, 145 pM, 150 pM, 155 pM, 200 pM, 205 pM, 210 pM, 215 pM, 220 pM, 225 pM, 230 pM, 235 pM, 240 pM, 245 pM, 250 pM, 255 pM, 260 pM, 265 pM, 270 pM, 275 pM, 280 pM, 285 pM, 290 pM, 295 pM, 300 pM, 305 pM, 310 pM, 315 pM, 320 pM, 325 pM, 330 pM, 335 pM, 340 pM, 345 pM, 350 pM, 355 pM, 360 pM, 365 pM, 370 pM, 375 pM, 380 pM, 385 pM, 390 pM, 395 pM, 400 pM, 405 pM, 410 pM, 415 pM, 420 pM, 425 pM, 430 pM, 435 pM, 440 pM, 445 pM, 450 pM, 455 pM, 460 pM, 465 pM, 470 pM, 475 pM, 480 pM, 485 pM, 490 pM, 495 pM, or 500 pM. In some embodiments, the hGCGR EC₅₀ is measured in a functional assay described in “EXAMPLE 1: GCG Receptor Agonist Activity.”

[0665] In some embodiments, the polypeptide has a human glucagon-like peptide-1 receptor (“hGLP-1R”) EC₅₀:hGCGR EC₅₀ ratio of at least 30:1. In some embodiments, the polypeptide has a hGLP-1R EC₅₀:hGCGR EC₅₀ ratio of at least 40:1. In some embodiments, the polypeptide has a hGLP-1R EC₅₀:hGCGR EC₅₀ ratio of at least 50:1. In some embodiments, the polypeptide has a hGLP-1R EC₅₀:hGCGR EC₅₀ ratio of at least 60:1. In some embodiments, the polypeptide has a hGLP-1R EC₅₀:hGCGR EC₅₀ ratio of at least 70:1. In some embodiments, the polypeptide has a hGLP-1R EC₅₀:hGCGR EC₅₀ ratio of at least 80:1. In some embodiments, the polypeptide has a hGLP-1R EC₅₀:hGCGR EC₅₀ ratio of at least 90:1. In some embodiments, the polypeptide has a hGLP-1R EC₅₀:hGCGR EC₅₀ ratio of at least 100:1. In some embodiments, the polypeptide has a hGLP-1R EC₅₀:hGCGR EC₅₀ ratio of at least 150:1. In some embodiments, the polypeptide has a hGLP-1R EC₅₀:hGCGR EC₅₀ ratio of at least 200:1. In some embodiments, the polypeptide has a hGLP-1R EC₅₀:hGCGR EC₅₀ ratio of at least 250:1. In some embodiments, the polypeptide has a hGLP-1R EC₅₀:hGCGR EC₅₀ ratio of at least 300:1. In some embodiments, the polypeptide has a hGLP-1R EC₅₀:hGCGR EC₅₀ ratio of at least 350:1. In some embodiments, the polypeptide has a hGLP-1R EC₅₀:hGCGR EC₅₀ ratio of at least 400:1. In some embodiments, the polypeptide has a hGLP-1R EC₅₀:hGCGR EC₅₀ ratio of at least 450:1. In some embodiments, the polypeptide has a hGLP-1R EC₅₀:hGCGR EC₅₀ ratio of at least 500:1. In some embodiments, the polypeptide has a hGLP-1R EC₅₀:hGCGR EC₅₀ ratio of at least 550:1. In some embodiments, the polypeptide has a hGLP-1R EC₅₀:hGCGR EC₅₀ ratio of at least 650:1. In some embodiments, the polypeptide has a hGLP-1R EC₅₀:hGCGR EC₅₀ ratio of at least 700:1. In some embodiments, the polypeptide has a hGLP-1R EC₅₀:hGCGR EC₅₀ ratio of at least 750:1. In some embodiments, the polypeptide has a hGLP-1R EC₅₀:hGCGR EC₅₀ ratio of at least 800:1. In some embodiments, the polypeptide has a hGLP-1R EC₅₀:hGCGR EC₅₀ ratio of at least 850:1. In some embodiments, the polypeptide has a hGLP-1R EC₅₀:hGCGR EC₅₀ ratio of at least 900:1. In some embodiments, the polypeptide has a hGLP-1R EC₅₀:hGCGR EC₅₀ ratio of at least 950:1. In some embodiments, the polypeptide has a hGLP-1R EC₅₀:hGCGR EC₅₀ ratio of at least 1000:1. In some embodiments, the hGCGR EC₅₀ is measured in a functional assay described in “EXAMPLE 1: GCG Receptor Agonist Activity” and the hGLP-1R EC₅₀ is measured in a functional assay described in “EXAMPLE 2: GLP-1 Receptor Agonist Activity.”

[0666] In some embodiments, the polypeptide has a hGLP-1R EC₅₀:hGCGR EC₅₀ ratio of 30:1, 40:1, 45:1, 50:1, 55:1, 60:1, 65:1, 70:1, 75:1, 80:1, 85:1, 90:1, 95:1, 100:1, 125:1, 150:1, 175:1, 200:1, 225:1, 250:1, 275:1, 300:1, 325:1, 350:1, 375:1, 400:1, 425:1, 450:1, 475:1, 500:1, 525:1, 550:1, 575:1, 600:1, 625:1, 650:1, 675:1, 700:1, 725:1, 750:1, 775:1, 800:1, 825:1, 850:1, 875:1, 900:1, 925:1, 950:1, 975:1, or 1000:1. In some embodiments, the hGCGR EC₅₀ is measured in a functional assay described in “EXAMPLE 1: GCG Receptor Agonist Activity” and the hGLP-1R EC₅₀ is measured in a functional assay described in “EXAMPLE 2: GLP-1 Receptor Agonist Activity.”

[0667] Provided herein is a polypeptide that agonizes a GCGR, wherein:
[0668] the polypeptide comprises at least 28 amino acids, wherein the polypeptide comprises 2-aminoisobutyric acid at position 16, leucine at position 27, and lysine at position 28; and
[0669] the polypeptide has at least 89% sequence identity to the amino acid sequence of SEQ ID NO: 1615.

[0670] In some embodiments, the polypeptide is a linear polypeptide. In some embodiments, the polypeptide is a peptide. In some embodiments, the peptide is a linear peptide.

[0671] In some embodiments, the polypeptide comprises 29 amino acids.

[0672] In some embodiments, the polypeptide has at least 93% sequence identity to the amino acid sequence of SEQ ID NO: 1615. In some embodiments, the polypeptide has at least 96% sequence identity to the amino acid sequence of SEQ ID NO: 1615.

[0673] In some embodiments, the polypeptide comprises an amino acid sequence having at most three (e.g., zero, one, two, three) amino acid modifications relative to SEQ ID NO: 1615. In some embodiments, the polypeptide comprises an amino acid sequence having at most two amino acid modifications relative to SEQ ID NO: 1615. In some embodiments, the polypeptide comprises an amino acid sequence having at most one amino acid modification relative to SEQ ID NO: 1615.

[0674] In some embodiments, each amino acid modification, if any, is an amino acid substitution. In some embodiments, each amino acid modification, if any, is a conservative amino acid substitution. In some embodiments, each amino acid modification, if any, is a conservative amino acid substitution listed in Table 1.

[0675] In some embodiments, the at most one amino acid modification is an amino acid deletion. In some embodiments, the at most one amino acid modification is an amino acid addition.

[0676] In some embodiments, the polypeptide comprises d-serine at position 2.

[0677] In some embodiments, the polypeptide comprises aspartic acid or glutamic acid at position 24. In some embodiments, the polypeptide comprises aspartic acid at position 24. In some embodiments, the polypeptide comprises glutamic acid at position 24.

[0678] In some embodiments, the polypeptide comprises d-serine at position 2 and aspartic acid or glutamic acid at position 24. In some embodiments, the polypeptide comprises d-serine at position 2 and aspartic acid at position 24. In some embodiments, the polypeptide comprises d-serine at position 2 and glutamic acid at position 24.

[0679] In some embodiments, the polypeptide comprises lysine at position 17.

[0680] In some embodiments, the polypeptide further comprises d-serine at position 2, lysine at position 17, and aspartic acid at position 24.

[0681] In some embodiments, the polypeptide agonizes human GCGR (“hGCGR”). In some embodiments, the hGCGR comprises the amino acid sequence of SEQ ID NO: 1576.

[0682] In some embodiments, the polypeptide has a hGCGR EC₅₀ of less than or equal to 1 nM.

[0683] In some embodiments, the polypeptide has a hGCGR EC₅₀ of less than or equal to 500 pM (e.g., less than or equal to 475 pM, less than or equal to 450 pM, less than or equal to 425 pM, less than or equal to 400 pM, less than or equal to 375 pM, less than or equal to 350 pM, less than or equal to 325 pM, less than or equal to 300 pM, less than or equal to 275 pM, less than or equal to 250 pM, less than or equal to 225 pM, less than or equal to 200 pM, less than or equal to 175 pM, less than or equal to 150 pM, less than or equal to 125 pM, less than or equal to 100 pM). In some embodiments, the hGCGR EC₅₀ is measured in a functional assay described in “EXAMPLE 1: GCG Receptor Agonist Activity.”

[0684] In some embodiments, the polypeptide has a hGCGR EC₅₀ of 50 pM, 55 pM, 60 pM, 65 pM, 70 pM, 75 pM, 80 pM, 85 pM, 90 pM, 95 pM, 100 pM, 105 pM, 110 pM, 115 pM, 120 pM, 125 pM, 130 pM, 135 pM, 140 pM, 145 pM, 150 pM, 155 pM, 200 pM, 205 pM, 210 pM, 215 pM, 220 pM, 225 pM, 230 pM, 235 pM, 240 pM, 245 pM, 250 pM, 255 pM, 260 pM, 265 pM, 270 pM, 275 pM, 280 pM, 285 pM, 290 pM, 295 pM, 300 pM, 305 pM, 310 pM, 315 pM, 320 pM, 325 pM, 330 pM, 335 pM, 340 pM, 345 pM, 350 pM, 355 pM, 360 pM, 365 pM, 370 pM, 375 pM, 380 pM, 385 pM, 390 pM, 395 pM, 400 pM, 405 pM, 410 pM, 415 pM, 420 pM, 425 pM, 430 pM, 435 pM, 440 pM, 445 pM, 450 pM, 455 pM, 460 pM, 465 pM, 470 pM, 475 pM, 480 pM, 485 pM, 490 pM, 495 pM, or 500 pM. In some embodiments, the hGCGR EC₅₀ is measured in a functional assay described in “EXAMPLE 1: GCG Receptor Agonist Activity.”

[0685] In some embodiments, the polypeptide has a human glucagon-like peptide-1 receptor (“hGLP-1R”) EC₅₀:hGCGR EC₅₀ ratio of at least 30:1. In some embodiments, the polypeptide has a hGLP-1R EC₅₀:hGCGR EC₅₀ ratio of at least 40:1. In some embodiments, the polypeptide has a hGLP-1R EC₅₀:hGCGR EC₅₀ ratio of at least 50:1. In some embodiments, the polypeptide has a hGLP-1R EC₅₀:hGCGR EC₅₀ ratio of at least 60:1. In some embodiments, the polypeptide has a hGLP-1R EC₅₀:hGCGR EC₅₀ ratio of at least 70:1. In some embodiments, the polypeptide has a hGLP-1R EC₅₀:hGCGR EC₅₀ ratio of at least 80:1. In some embodiments, the polypeptide has a hGLP-1R EC₅₀:hGCGR EC₅₀ ratio of at least 90:1. In some embodiments, the polypeptide has a hGLP-1R EC₅₀:hGCGR EC₅₀ ratio of at least 100:1. In some embodiments, the polypeptide has a hGLP-1R EC₅₀:hGCGR EC₅₀ ratio of at least 150:1. In some embodiments, the polypeptide has a hGLP-1R EC₅₀:hGCGR EC₅₀ ratio of at least 200:1. In some embodiments, the polypeptide has a hGLP-1R EC₅₀:hGCGR EC₅₀ ratio of at least 250:1. In some embodiments, the polypeptide has a hGLP-1R EC₅₀:hGCGR EC₅₀ ratio of at least 300:1. In some embodiments, the polypeptide has a hGLP-1R EC₅₀:hGCGR EC₅₀ ratio of at least 350:1. In some embodiments, the polypeptide has a hGLP-1R EC₅₀:hGCGR EC₅₀ ratio of at least 400:1. In some embodiments, the polypeptide has a hGLP-1R EC₅₀:hGCGR EC₅₀ ratio of at least 450:1. In some embodiments, the polypeptide has a hGLP-1R EC₅₀:hGCGR EC₅₀ ratio of at least 500:1. In some embodiments, the polypeptide has a hGLP-1R EC₅₀:hGCGR EC₅₀ ratio of at least 550:1. In some embodiments, the polypeptide has a hGLP-1R EC₅₀:hGCGR EC₅₀ ratio of at least 650:1. In some embodiments, the polypeptide has a hGLP-1R EC₅₀:hGCGR EC₅₀ ratio of at least 700:1. In some embodiments, the polypeptide has a hGLP-1R EC₅₀:hGCGR EC₅₀ ratio of at least 750:1. In some embodiments, the polypeptide has a hGLP-1R EC₅₀:hGCGR EC₅₀ ratio of at least 800:1. In some embodiments, the polypeptide has a hGLP-1R EC₅₀:hGCGR EC₅₀ ratio of at least 850:1. In some embodiments, the polypeptide has a hGLP-1R EC₅₀:hGCGR EC₅₀ ratio of at least 900:1. In some embodiments, the polypeptide has a hGLP-1R EC₅₀:hGCGR EC₅₀ ratio of at least 950:1. In some embodiments, the polypeptide has a hGLP-1R EC₅₀:hGCGR EC₅₀ ratio of at least 1000:1. In some embodiments, the hGCGR EC₅₀ is measured in a functional assay described in “EXAMPLE 1: GCG Receptor Agonist Activity” and the hGLP-1R EC₅₀ is measured in a functional assay described in “EXAMPLE 2: GLP-1 Receptor Agonist Activity.”

[0686] In some embodiments, the polypeptide has a hGLP-1R EC₅₀:hGCGR EC₅₀ ratio of 30:1, 40:1, 45:1, 50:1, 55:1, 60:1, 65:1, 70:1, 75:1, 80:1, 85:1, 90:1, 95:1, 100:1, 125:1, 150:1, 175:1, 200:1, 225:1, 250:1, 275:1, 300:1, 325:1, 350:1, 375:1, 400:1, 425:1, 450:1, 475:1, 500:1, 525:1, 550:1, 575:1, 600:1, 625:1, 650:1, 675:1, 700:1, 725:1, 750:1, 775:1, 800:1, 825:1, 850:1, 875:1, 900:1, 925:1, 950:1, 975:1, or 1000:1. In some embodiments, the hGCGR EC₅₀ is measured in a functional assay described in “EXAMPLE 1: GCG Receptor Agonist Activity” and the hGLP-1R EC₅₀ is measured in a functional assay described in “EXAMPLE 2: GLP-1 Receptor Agonist Activity.”

[0687] Provided herein is a polypeptide that agonizes a GCGR, wherein:
[0688] the polypeptide comprises at least 28 amino acids, wherein the polypeptide comprises 2-aminoisobutyric acid at position 16, aspartic acid at position 24, and lysine at position 28; and
[0689] the polypeptide has at least 89% sequence identity to the amino acid sequence of SEQ ID NO: 1626.

[0690] In some embodiments, the polypeptide is a linear polypeptide. In some embodiments, the polypeptide is a peptide. In some embodiments, the peptide is a linear peptide.

[0691] In some embodiments, the polypeptide comprises 29 amino acids.

[0692] In some embodiments, the polypeptide has at least 93% sequence identity to the amino acid sequence of SEQ ID NO: 1626. In some embodiments, the polypeptide has at least 96% sequence identity to the amino acid sequence of SEQ ID NO: 1626.

[0693] In some embodiments, the polypeptide comprises an amino acid sequence having at most three (e.g., zero, one, two, three) amino acid modifications relative to SEQ ID NO: 1626. In some embodiments, the polypeptide comprises an amino acid sequence having at most two amino acid modifications relative to SEQ ID NO: 1626. In some embodiments, the polypeptide comprises an amino acid sequence having at most one amino acid modification relative to SEQ ID NO: 1626.

[0694] In some embodiments, each amino acid modification, if any, is an amino acid substitution. In some embodiments, each amino acid modification, if any, is a conservative amino acid substitution. In some embodiments, each amino acid modification, if any, is a conservative amino acid substitution listed in Table 1.

[0695] In some embodiments, the at most one amino acid modification is an amino acid deletion. In some embodiments, the at most one amino acid modification is an amino acid addition.

[0696] In some embodiments, the polypeptide comprises d-serine at position 2.

[0697] In some embodiments, the polypeptide comprises lysine at position 17.

[0698] In some embodiments, the polypeptide further comprises leucine at position 27.

[0699] In some embodiments, the polypeptide agonizes human GCGR (“hGCGR”). In some embodiments, the hGCGR comprises the amino acid sequence of SEQ ID NO: 1576.

[0700] In some embodiments, the polypeptide has a hGCGR EC₅₀ of less than or equal to 1 nM.

[0701] In some embodiments, the polypeptide has a hGCGR EC₅₀ of less than or equal to 500 pM (e.g., less than or equal to 475 pM, less than or equal to 450 pM, less than or equal to 425 pM, less than or equal to 400 pM, less than or equal to 375 pM, less than or equal to 350 pM, less than or equal to 325 pM, less than or equal to 300 pM, less than or equal to 275 pM, less than or equal to 250 pM, less than or equal to 225 pM, less than or equal to 200 pM, less than or equal to 175 pM, less than or equal to 150 pM, less than or equal to 125 pM, less than or equal to 100 pM). In some embodiments, the hGCGR EC₅₀ is measured in a functional assay described in “EXAMPLE 1: GCG Receptor Agonist Activity.”

[0702] In some embodiments, the polypeptide has a hGCGR EC₅₀ of 50 pM, 55 pM, 60 pM, 65 pM, 70 pM, 75 pM, 80 pM, 85 pM, 90 pM, 95 pM, 100 pM, 105 pM, 110 pM, 115 pM, 120 pM, 125 pM, 130 pM, 135 pM, 140 pM, 145 pM, 150 pM, 155 pM, 200 pM, 205 pM, 210 pM, 215 pM, 220 pM, 225 pM, 230 pM, 235 pM, 240 pM, 245 pM, 250 pM, 255 pM, 260 pM, 265 pM, 270 pM, 275 pM, 280 pM, 285 pM, 290 pM, 295 pM, 300 pM, 305 pM, 310 pM, 315 pM, 320 pM, 325 pM, 330 pM, 335 pM, 340 pM, 345 pM, 350 pM, 355 pM, 360 pM, 365 pM, 370 pM, 375 pM, 380 pM, 385 pM, 390 pM, 395 pM, 400 pM, 405 pM, 410 pM, 415 pM, 420 pM, 425 pM, 430 pM, 435 pM, 440 pM, 445 pM, 450 pM, 455 pM, 460 pM, 465 pM, 470 pM, 475 pM, 480 pM, 485 pM, 490 pM, 495 pM, or 500 pM. In some embodiments, the hGCGR EC₅₀ is measured in a functional assay described in “EXAMPLE 1: GCG Receptor Agonist Activity.”

[0703] In some embodiments, the polypeptide has a human glucagon-like peptide-1 receptor (“hGLP-1R”) EC₅₀:hGCGR EC₅₀ ratio of at least 30:1. In some embodiments, the polypeptide has a hGLP-1R EC₅₀:hGCGR EC₅₀ ratio of at least 40:1. In some embodiments, the polypeptide has a hGLP-1R EC₅₀:hGCGR EC₅₀ ratio of at least 50:1. In some embodiments, the polypeptide has a hGLP-1R EC₅₀:hGCGR EC₅₀ ratio of at least 60:1. In some embodiments, the polypeptide has a hGLP-1R EC₅₀:hGCGR EC₅₀ ratio of at least 70:1. In some embodiments, the polypeptide has a hGLP-1R EC₅₀:hGCGR EC₅₀ ratio of at least 80:1. In some embodiments, the polypeptide has a hGLP-1R EC₅₀:hGCGR EC₅₀ ratio of at least 90:1. In some embodiments, the polypeptide has a hGLP-1R EC₅₀:hGCGR EC₅₀ ratio of at least 100:1. In some embodiments, the polypeptide has a hGLP-1R EC₅₀:hGCGR EC₅₀ ratio of at least 150:1. In some embodiments, the polypeptide has a hGLP-1R EC₅₀:hGCGR EC₅₀ ratio of at least 200:1. In some embodiments, the polypeptide has a hGLP-1R EC₅₀:hGCGR EC₅₀ ratio of at least 250:1. In some embodiments, the polypeptide has a hGLP-1R EC₅₀:hGCGR EC₅₀ ratio of at least 300:1. In some embodiments, the polypeptide has a hGLP-1R EC₅₀:hGCGR EC₅₀ ratio of at least 350:1. In some embodiments, the polypeptide has a hGLP-1R EC₅₀:hGCGR EC₅₀ ratio of at least 400:1. In some embodiments, the polypeptide has a hGLP-1R EC₅₀:hGCGR EC₅₀ ratio of at least 450:1. In some embodiments, the polypeptide has a hGLP-1R EC₅₀:hGCGR EC₅₀ ratio of at least 500:1. In some embodiments, the polypeptide has a hGLP-1R EC₅₀:hGCGR EC₅₀ ratio of at least 550:1. In some embodiments, the polypeptide has a hGLP-1R EC₅₀:hGCGR EC₅₀ ratio of at least 650:1. In some embodiments, the polypeptide has a hGLP-1R EC₅₀:hGCGR EC₅₀ ratio of at least 700:1. In some embodiments, the polypeptide has a hGLP-1R EC₅₀:hGCGR EC₅₀ ratio of at least 750:1. In some embodiments, the polypeptide has a hGLP-1R EC₅₀:hGCGR EC₅₀ ratio of at least 800:1. In some embodiments, the polypeptide has a hGLP-1R EC₅₀:hGCGR EC₅₀ ratio of at least 850:1. In some embodiments, the polypeptide has a hGLP-1R EC₅₀:hGCGR EC₅₀ ratio of at least 900:1. In some embodiments, the polypeptide has a hGLP-1R EC₅₀:hGCGR EC₅₀ ratio of at least 950:1. In some embodiments, the polypeptide has a hGLP-1R EC₅₀:hGCGR EC₅₀ ratio of at least 1000:1. In some embodiments, the hGCGR EC₅₀ is measured in a functional assay described in “EXAMPLE 1: GCG Receptor Agonist Activity” and the hGLP-1R EC₅₀ is measured in a functional assay described in “EXAMPLE 2: GLP-1 Receptor Agonist Activity.”

[0704] In some embodiments, the polypeptide has a hGLP-1R EC₅₀:hGCGR EC₅₀ ratio of 30:1, 40:1, 45:1, 50:1, 55:1, 60:1, 65:1, 70:1, 75:1, 80:1, 85:1, 90:1, 95:1, 100:1, 125:1, 150:1, 175:1, 200:1, 225:1, 250:1, 275:1, 300:1, 325:1, 350:1, 375:1, 400:1, 425:1, 450:1, 475:1, 500:1, 525:1, 550:1, 575:1, 600:1, 625:1, 650:1, 675:1, 700:1, 725:1, 750:1, 775:1, 800:1, 825:1, 850:1, 875:1, 900:1, 925:1, 950:1, 975:1, or 1000:1. In some embodiments, the hGCGR EC₅₀ is measured in a functional assay described in “EXAMPLE 1: GCG Receptor Agonist Activity” and the hGLP-1R EC₅₀ is measured in a functional assay described in “EXAMPLE 2: GLP-1 Receptor Agonist Activity.

[0705] Provided herein is a polypeptide that agonizes a GCGR, wherein:
[0706] the polypeptide comprises at least 28 amino acids, wherein the polypeptide comprises a d-serine at position 2 and a 2-aminoisobutyric acid at position 16; and
[0707] the polypeptide has at least 89% sequence identity to the amino acid sequence of SEQ ID NO: 1822.

[0708] In some embodiments, the polypeptide is a linear polypeptide. In some embodiments, the polypeptide is a peptide. In some embodiments, the peptide is a linear peptide.

[0709] In some embodiments, the polypeptide comprises 29 amino acids.

[0710] In some embodiments, the polypeptide has at least 93% sequence identity to the amino acid sequence of SEQ ID NO: 1822. In some embodiments, the polypeptide has at least 96% sequence identity to the amino acid sequence of SEQ ID NO: 1822.

[0711] In some embodiments, the polypeptide comprises an amino acid sequence having at most three (e.g., zero, one, two, three) amino acid modifications relative to SEQ ID NO: 1822. In some embodiments, the polypeptide comprises an amino acid sequence having at most two amino acid modifications relative to SEQ ID NO: 1822. In some embodiments, the polypeptide comprises an amino acid sequence having at most one amino acid modification relative to SEQ ID NO: 1615.

[0712] In some embodiments, each amino acid modification, if any, is an amino acid substitution. In some embodiments, each amino acid modification, if any, is a conservative amino acid substitution. In some embodiments, each amino acid modification, if any, is a conservative amino acid substitution listed in Table 1.

[0713] In some embodiments, the at most one amino acid modification is an amino acid deletion. In some embodiments, the at most one amino acid modification is an amino acid addition.

[0714] In some embodiments, the polypeptide further comprises lysine at position 17, glutamic acid at position 21, lysine at position 24, leucine at position 27, glutamic acid, alanine, or lysine at position 28, serine or threonine at position 29, or a combination of any of the foregoing.

[0715] In some embodiments, the polypeptide further comprises lysine at position 17, glutamic acid at position 21, lysine at position 24, leucine at position 27, glutamic acid at position 28, serine at position 29, or a combination of any of the foregoing.

[0716] In some embodiments, the polypeptide further comprises lysine at position 17. In some embodiments, the polypeptide further comprises glutamic acid at position 21. In some embodiments, the polypeptide further comprises lysine at position 24. In some embodiments, the polypeptide further comprises leucine at position 27. In some embodiments, the polypeptide further comprises glutamic acid at position 28. In some embodiments, the polypeptide further comprises serine at position 29.

[0717] In some embodiments, the polypeptide further comprises lysine at position 17, glutamic acid at position 21, leucine at position 27, and glutamic acid at position 28.

[0718] In some embodiments, the polypeptide further comprises lysine at position 17, glutamic acid at position 21, leucine at position 27, glutamic acid at position 28, and lysine at position 24 or position 28.

[0719] In some embodiments, the polypeptide has a hGCGR EC₅₀ of less than or equal to 1 nM.

[0720] In some embodiments, the polypeptide has a hGCGR EC₅₀ of less than or equal to 500 pM (e.g., less than or equal to 475 pM, less than or equal to 450 pM, less than or equal to 425 pM, less than or equal to 400 pM, less than or equal to 375 pM, less than or equal to 350 pM, less than or equal to 325 pM, less than or equal to 300 pM, less than or equal to 275 pM, less than or equal to 250 pM, less than or equal to 225 pM, less than or equal to 200 pM, less than or equal to 175 pM, less than or equal to 150 pM, less than or equal to 125 pM, less than or equal to 100 pM). In some embodiments, the hGCGR EC₅₀ is measured in a functional assay described in “EXAMPLE 1: GCG Receptor Agonist Activity.”

[0721] In some embodiments, the polypeptide has a hGCGR EC₅₀ of 50 pM, 55 pM, 60 pM, 65 pM, 70 pM, 75 pM, 80 pM, 85 pM, 90 pM, 95 pM, 100 pM, 105 pM, 110 pM, 115 pM, 120 pM, 125 pM, 130 pM, 135 pM, 140 pM, 145 pM, 150 pM, 155 pM, 200 pM, 205 pM, 210 pM, 215 pM, 220 pM, 225 pM, 230 pM, 235 pM, 240 pM, 245 pM, 250 pM, 255 pM, 260 pM, 265 pM, 270 pM, 275 pM, 280 pM, 285 pM, 290 pM, 295 pM, 300 pM, 305 pM, 310 pM, 315 pM, 320 pM, 325 pM, 330 pM, 335 pM, 340 pM, 345 pM, 350 pM, 355 pM, 360 pM, 365 pM, 370 pM, 375 pM, 380 pM, 385 pM, 390 pM, 395 pM, 400 pM, 405 pM, 410 pM, 415 pM, 420 pM, 425 pM, 430 pM, 435 pM, 440 pM, 445 pM, 450 pM, 455 pM, 460 pM, 465 pM, 470 pM, 475 pM, 480 pM, 485 pM, 490 pM, 495 pM, or 500 pM. In some embodiments, the hGCGR EC₅₀ is measured in a functional assay described in “EXAMPLE 1: GCG Receptor Agonist Activity.”

[0722] In some embodiments, the polypeptide has a human glucagon-like peptide-1 receptor (“hGLP-1R”) EC₅₀:hGCGR EC₅₀ ratio of at least 30:1. In some embodiments, the polypeptide has a hGLP-1R EC₅₀:hGCGR EC₅₀ ratio of at least 40:1. In some embodiments, the polypeptide has a hGLP-1R EC₅₀:hGCGR EC₅₀ ratio of at least 50:1. In some embodiments, the polypeptide has a hGLP-1R EC₅₀:hGCGR EC₅₀ ratio of at least 60:1. In some embodiments, the polypeptide has a hGLP-1R EC₅₀:hGCGR EC₅₀ ratio of at least 70:1. In some embodiments, the polypeptide has a hGLP-1R EC₅₀:hGCGR EC₅₀ ratio of at least 80:1. In some embodiments, the polypeptide has a hGLP-1R EC₅₀:hGCGR EC₅₀ ratio of at least 90:1. In some embodiments, the polypeptide has a hGLP-1R EC₅₀:hGCGR EC₅₀ ratio of at least 100:1. In some embodiments, the polypeptide has a hGLP-1R EC₅₀:hGCGR EC₅₀ ratio of at least 150:1. In some embodiments, the polypeptide has a hGLP-1R EC₅₀:hGCGR EC₅₀ ratio of at least 200:1. In some embodiments, the polypeptide has a hGLP-1R EC₅₀:hGCGR EC₅₀ ratio of at least 250:1. In some embodiments, the polypeptide has a hGLP-1R EC₅₀:hGCGR EC₅₀ ratio of at least 300:1. In some embodiments, the polypeptide has a hGLP-1R EC₅₀:hGCGR EC₅₀ ratio of at least 350:1. In some embodiments, the polypeptide has a hGLP-1R EC₅₀:hGCGR EC₅₀ ratio of at least 400:1. In some embodiments, the polypeptide has a hGLP-1R EC₅₀:hGCGR EC₅₀ ratio of at least 450:1. In some embodiments, the polypeptide has a hGLP-1R EC₅₀:hGCGR EC₅₀ ratio of at least 500:1. In some embodiments, the polypeptide has a hGLP-1R EC₅₀:hGCGR EC₅₀ ratio of at least 550:1. In some embodiments, the polypeptide has a hGLP-1R EC₅₀:hGCGR EC₅₀ ratio of at least 650:1. In some embodiments, the polypeptide has a hGLP-1R EC₅₀:hGCGR EC₅₀ ratio of at least 700:1. In some embodiments, the polypeptide has a hGLP-1R EC₅₀:hGCGR EC₅₀ ratio of at least 750:1. In some embodiments, the polypeptide has a hGLP-1R EC₅₀:hGCGR EC₅₀ ratio of at least 800:1. In some embodiments, the polypeptide has a hGLP-1R EC₅₀:hGCGR EC₅₀ ratio of at least 850:1. In some embodiments, the polypeptide has a hGLP-1R EC₅₀:hGCGR EC₅₀ ratio of at least 900:1. In some embodiments, the polypeptide has a hGLP-1R EC₅₀:hGCGR EC₅₀ ratio of at least 950:1. In some embodiments, the polypeptide has a hGLP-1R EC₅₀:hGCGR EC₅₀ ratio of at least 1000:1. In some embodiments, the hGCGR EC₅₀ is measured in a functional assay described in “EXAMPLE 1: GCG Receptor Agonist Activity” and the hGLP-1R EC₅₀ is measured in a functional assay described in “EXAMPLE 2: GLP-1 Receptor Agonist Activity.”

[0723] In some embodiments, the polypeptide has a hGLP-1R EC₅₀:hGCGR EC₅₀ ratio of 30:1, 40:1, 45:1, 50:1, 55:1, 60:1, 65:1, 70:1, 75:1, 80:1, 85:1, 90:1, 95:1, 100:1, 125:1, 150:1, 175:1, 200:1, 225:1, 250:1, 275:1, 300:1, 325:1, 350:1, 375:1, 400:1, 425:1, 450:1, 475:1, 500:1, 525:1, 550:1, 575:1, 600:1, 625:1, 650:1, 675:1, 700:1, 725:1, 750:1, 775:1, 800:1, 825:1, 850:1, 875:1, 900:1, 925:1, 950:1, 975:1, or 1000:1. In some embodiments, the hGCGR EC₅₀ is measured in a functional assay described in “EXAMPLE 1: GCG Receptor Agonist Activity” and the hGLP-1R EC₅₀ is measured in a functional assay described in “EXAMPLE 2: GLP-1 Receptor Agonist Activity.”

[0724] Provided herein is a polypeptide that agonizes a GCGR comprising the amino acid sequence of any one of SEQ ID NOs: 1587-1627, 1747-1840, 1859-1862, or 1879-1881. In some embodiments, the polypeptide comprises the amino acid sequence of any one of SEQ ID NOs: 1587-1627 or 1747. In some embodiments, the polypeptide comprises the amino acid sequence of any one of SEQ ID NOs: 1748-1840, 1859-1862, or 1879-1881.

[0725] In some embodiments, the polypeptide comprises the amino acid sequence of SEQ ID NO: 1587. In some embodiments, the polypeptide comprises the amino acid sequence of SEQ ID NO: 1588. In some embodiments, the polypeptide comprises the amino acid sequence of SEQ ID NO: 1589. In some embodiments, the polypeptide comprises the amino acid sequence of SEQ ID NO: 1590. In some embodiments, the polypeptide comprises the amino acid sequence of SEQ ID NO: 1591. In some embodiments, the polypeptide comprises the amino acid sequence of SEQ ID NO: 1592. In some embodiments, the polypeptide comprises the amino acid sequence of SEQ ID NO: 1593. In some embodiments, the polypeptide comprises the amino acid sequence of SEQ ID NO: 1594. In some embodiments, the polypeptide comprises the amino acid sequence of SEQ ID NO: 1595. In some embodiments, the polypeptide comprises the amino acid sequence of SEQ ID NO: 1596. In some embodiments, the polypeptide comprises the amino acid sequence of SEQ ID NO: 1597. In some embodiments, the polypeptide comprises the amino acid sequence of SEQ ID NO: 1598. In some embodiments, the polypeptide comprises the amino acid sequence of SEQ ID NO: 1599. In some embodiments, the polypeptide comprises the amino acid sequence of SEQ ID NO: 1600. In some embodiments, the polypeptide comprises the amino acid sequence of SEQ ID NO: 1601. In some embodiments, the polypeptide comprises the amino acid sequence of SEQ ID NO: 1602. In some embodiments, the polypeptide comprises the amino acid sequence of SEQ ID NO: 1603. In some embodiments, the polypeptide comprises the amino acid sequence of SEQ ID NO: 1604. In some embodiments, the polypeptide comprises the amino acid sequence of SEQ ID NO: 1605. In some embodiments, the polypeptide comprises the amino acid sequence of SEQ ID NO: 1606. In some embodiments, the polypeptide comprises the amino acid sequence of SEQ ID NO: 1607. In some embodiments, the polypeptide comprises the amino acid sequence of SEQ ID NO: 1608. In some embodiments, the polypeptide comprises the amino acid sequence of SEQ ID NO: 1609. In some embodiments, the polypeptide comprises the amino acid sequence of SEQ ID NO: 1610. In some embodiments, the polypeptide comprises the amino acid sequence of SEQ ID NO: 1611. In some embodiments, the polypeptide comprises the amino acid sequence of SEQ ID NO: 1612. In some embodiments, the polypeptide comprises the amino acid sequence of SEQ ID NO: 1613. In some embodiments, the polypeptide comprises the amino acid sequence of SEQ ID NO: 1614. In some embodiments, the polypeptide comprises the amino acid sequence of SEQ ID NO: 1615. In some embodiments, the polypeptide comprises the amino acid sequence of SEQ ID NO: 1616. In some embodiments, the polypeptide comprises the amino acid sequence of SEQ ID NO: 1617. In some embodiments, the polypeptide comprises the amino acid sequence of SEQ ID NO: 1618. In some embodiments, the polypeptide comprises the amino acid sequence of SEQ ID NO: 1619. In some embodiments, the polypeptide comprises the amino acid sequence of SEQ ID NO: 1620. In some embodiments, the polypeptide comprises the amino acid sequence of SEQ ID NO: 1621. In some embodiments, the polypeptide comprises the amino acid sequence of SEQ ID NO: 1622. In some embodiments, the polypeptide comprises the amino acid sequence of SEQ ID NO: 1623. In some embodiments, the polypeptide comprises the amino acid sequence of SEQ ID NO: 1624. In some embodiments, the polypeptide comprises the amino acid sequence of SEQ ID NO: 1625. In some embodiments, the polypeptide comprises the amino acid sequence of SEQ ID NO: 1626. In some embodiments, the polypeptide comprises the amino acid sequence of SEQ ID NO: 1627.

[0726] In some embodiments, the polypeptide comprises the amino acid sequence of SEQ ID NO: 1747. In some embodiments, the polypeptide comprises the amino acid sequence of SEQ ID NO: 1748. In some embodiments, the polypeptide comprises the amino acid sequence of SEQ ID NO: 1749. In some embodiments, the polypeptide comprises the amino acid sequence of SEQ ID NO: 1750. In some embodiments, the polypeptide comprises the amino acid sequence of SEQ ID NO: 1751. In some embodiments, the polypeptide comprises the amino acid sequence of SEQ ID NO: 1752. In some embodiments, the polypeptide comprises the amino acid sequence of SEQ ID NO: 1753. In some embodiments, the polypeptide comprises the amino acid sequence of SEQ ID NO: 1754. In some embodiments, the polypeptide comprises the amino acid sequence of SEQ ID NO: 1755. In some embodiments, the polypeptide comprises the amino acid sequence of SEQ ID NO: 1756. In some embodiments, the polypeptide comprises the amino acid sequence of SEQ ID NO: 1757. In some embodiments, the polypeptide comprises the amino acid sequence of SEQ ID NO: 1758. In some embodiments, the polypeptide comprises the amino acid sequence of SEQ ID NO: 1759. In some embodiments, the polypeptide comprises the amino acid sequence of SEQ ID NO: 1760. In some embodiments, the polypeptide comprises the amino acid sequence of SEQ ID NO: 1761. In some embodiments, the polypeptide comprises the amino acid sequence of SEQ ID NO: 1762. In some embodiments, the polypeptide comprises the amino acid sequence of SEQ ID NO: 1763. In some embodiments, the polypeptide comprises the amino acid sequence of SEQ ID NO: 1764. In some embodiments, the polypeptide comprises the amino acid sequence of SEQ ID NO: 1765. In some embodiments, the polypeptide comprises the amino acid sequence of SEQ ID NO: 1766. In some embodiments, the polypeptide comprises the amino acid sequence of SEQ ID NO: 1767. In some embodiments, the polypeptide comprises the amino acid sequence of SEQ ID NO: 1768. In some embodiments, the polypeptide comprises the amino acid sequence of SEQ ID NO: 1769. In some embodiments, the polypeptide comprises the amino acid sequence of SEQ ID NO: 1770. In some embodiments, the polypeptide comprises the amino acid sequence of SEQ ID NO: 1771. In some embodiments, the polypeptide comprises the amino acid sequence of SEQ ID NO: 1772. In some embodiments, the polypeptide comprises the amino acid sequence of SEQ ID NO: 1773. In some embodiments, the polypeptide comprises the amino acid sequence of SEQ ID NO: 1774. In some embodiments, the polypeptide comprises the amino acid sequence of SEQ ID NO: 1775. In some embodiments, the polypeptide comprises the amino acid sequence of SEQ ID NO: 1776. In some embodiments, the polypeptide comprises the amino acid sequence of SEQ ID NO: 1777. In some embodiments, the polypeptide comprises the amino acid sequence of SEQ ID NO: 1778. In some embodiments, the polypeptide comprises the amino acid sequence of SEQ ID NO: 1779. In some embodiments, the polypeptide comprises the amino acid sequence of SEQ ID NO: 1780. In some embodiments, the polypeptide comprises the amino acid sequence of SEQ ID NO: 1781. In some embodiments, the polypeptide comprises the amino acid sequence of SEQ ID NO: 1782. In some embodiments, the polypeptide comprises the amino acid sequence of SEQ ID NO: 1783. In some embodiments, the polypeptide comprises the amino acid sequence of SEQ ID NO: 1784. In some embodiments, the polypeptide comprises the amino acid sequence of SEQ ID NO: 1785. In some embodiments, the polypeptide comprises the amino acid sequence of SEQ ID NO: 1786. In some embodiments, the polypeptide comprises the amino acid sequence of SEQ ID NO: 1787. In some embodiments, the polypeptide comprises the amino acid sequence of SEQ ID NO: 1788. In some embodiments, the polypeptide comprises the amino acid sequence of SEQ ID NO: 1789. In some embodiments, the polypeptide comprises the amino acid sequence of SEQ ID NO: 1790. In some embodiments, the polypeptide comprises the amino acid sequence of SEQ ID NO: 1791. In some embodiments, the polypeptide comprises the amino acid sequence of SEQ ID NO: 1792. In some embodiments, the polypeptide comprises the amino acid sequence of SEQ ID NO: 1793. In some embodiments, the polypeptide comprises the amino acid sequence of SEQ ID NO: 1794. In some embodiments, the polypeptide comprises the amino acid sequence of SEQ ID NO: 1795. In some embodiments, the polypeptide comprises the amino acid sequence of SEQ ID NO: 1796. In some embodiments, the polypeptide comprises the amino acid sequence of SEQ ID NO: 1797. In some embodiments, the polypeptide comprises the amino acid sequence of SEQ ID NO: 1798. In some embodiments, the polypeptide comprises the amino acid sequence of SEQ ID NO: 1799. In some embodiments, the polypeptide comprises the amino acid sequence of SEQ ID NO: 1800. In some embodiments, the polypeptide comprises the amino acid sequence of SEQ ID NO: 1801. In some embodiments, the polypeptide comprises the amino acid sequence of SEQ ID NO: 1802. In some embodiments, the polypeptide comprises the amino acid sequence of SEQ ID NO: 1803. In some embodiments, the polypeptide comprises the amino acid sequence of SEQ ID NO: 1804. In some embodiments, the polypeptide comprises the amino acid sequence of SEQ ID NO: 1805. In some embodiments, the polypeptide comprises the amino acid sequence of SEQ ID NO: 1806. In some embodiments, the polypeptide comprises the amino acid sequence of SEQ ID NO: 1807. In some embodiments, the polypeptide comprises the amino acid sequence of SEQ ID NO: 1808. In some embodiments, the polypeptide comprises the amino acid sequence of SEQ ID NO: 1809. In some embodiments, the polypeptide comprises the amino acid sequence of SEQ ID NO: 1810. In some embodiments, the polypeptide comprises the amino acid sequence of SEQ ID NO: 1811. In some embodiments, the polypeptide comprises the amino acid sequence of SEQ ID NO: 1812. In some embodiments, the polypeptide comprises the amino acid sequence of SEQ ID NO: 1813. In some embodiments, the polypeptide comprises the amino acid sequence of SEQ ID NO: 1814. In some embodiments, the polypeptide comprises the amino acid sequence of SEQ ID NO: 1815. In some embodiments, the polypeptide comprises the amino acid sequence of SEQ ID NO: 1816. In some embodiments, the polypeptide comprises the amino acid sequence of SEQ ID NO: 1817. In some embodiments, the polypeptide comprises the amino acid sequence of SEQ ID NO: 1818. In some embodiments, the polypeptide comprises the amino acid sequence of SEQ ID NO: 1819. In some embodiments, the polypeptide comprises the amino acid sequence of SEQ ID NO: 1820. In some embodiments, the polypeptide comprises the amino acid sequence of SEQ ID NO: 1821. In some embodiments, the polypeptide comprises the amino acid sequence of SEQ ID NO: 1822. In some embodiments, the polypeptide comprises the amino acid sequence of SEQ ID NO: 1823. In some embodiments, the polypeptide comprises the amino acid sequence of SEQ ID NO: 1824. In some embodiments, the polypeptide comprises the amino acid sequence of SEQ ID NO: 1825. In some embodiments, the polypeptide comprises the amino acid sequence of SEQ ID NO: 1826. In some embodiments, the polypeptide comprises the amino acid sequence of SEQ ID NO: 1827. In some embodiments, the polypeptide comprises the amino acid sequence of SEQ ID NO: 1828. In some embodiments, the polypeptide comprises the amino acid sequence of SEQ ID NO: 1829. In some embodiments, the polypeptide comprises the amino acid sequence of SEQ ID NO: 1830. In some embodiments, the polypeptide comprises the amino acid sequence of SEQ ID NO: 1831. In some embodiments, the polypeptide comprises the amino acid sequence of SEQ ID NO: 1832. In some embodiments, the polypeptide comprises the amino acid sequence of SEQ ID NO: 1833. In some embodiments, the polypeptide comprises the amino acid sequence of SEQ ID NO: 1834. In some embodiments, the polypeptide comprises the amino acid sequence of SEQ ID NO: 1835. In some embodiments, the polypeptide comprises the amino acid sequence of SEQ ID NO: 1836. In some embodiments, the polypeptide comprises the amino acid sequence of SEQ ID NO: 1837. In some embodiments, the polypeptide comprises the amino acid sequence of SEQ ID NO: 1838. In some embodiments, the polypeptide comprises the amino acid sequence of SEQ ID NO: 1839. In some embodiments, the polypeptide comprises the amino acid sequence of SEQ ID NO: 1840. In some embodiments, the polypeptide comprises the amino acid sequence of SEQ ID NO: 1859. In some embodiments, the polypeptide comprises the amino acid sequence of SEQ ID NO: 1860. In some embodiments, the polypeptide comprises the amino acid sequence of SEQ ID NO: 1861. In some embodiments, the polypeptide comprises the amino acid sequence of SEQ ID NO: 1862. In some embodiments, the polypeptide comprises the amino acid sequence of SEQ ID NO: 1879. In some embodiments, the polypeptide comprises the amino acid sequence of SEQ ID NO: 1880. In some embodiments, the polypeptide comprises the amino acid sequence of SEQ ID NO: 1881.

[0727] In some embodiments, the polypeptide comprises the amino acid sequence of any one of SEQ ID NOs: 1587, 1592, 1615, 1626, 1818, 1822, 1825, or 1826. In some embodiments, the polypeptide comprises the amino acid sequence of any one of SEQ ID NOs: 1587, 1592, 1615, or 1626.

[0728] In some embodiments, the polypeptide comprises the amino acid sequence of any one of SEQ ID NOs: 1596, 1597, 1615, 1626, 1818, 1822, 1825, or 1826. In some embodiments, the polypeptide comprises the amino acid sequence of any one of SEQ ID NOs: 1626, 1818, 1822, 1825, or 1826. In some embodiments, the polypeptide comprises the amino acid sequence of any one of SEQ ID NOs: 1596, 1597, 1615, or 1626.

[0729] In some embodiments, the polypeptide consists of the amino acid sequence of any one of SEQ ID NOs: 1587-1627 or 1747. In some embodiments, the polypeptide consists of the amino acid sequence of any one of SEQ ID NOs: 1748-1840, 1859-1862, or 1879-1881.

[0730] In some embodiments, the polypeptide consists of the amino acid sequence of any one of SEQ ID NOs: 1587-1627.

[0731] In some embodiments, the polypeptide consists of the amino acid sequence of SEQ ID NO: 1587. In some embodiments, the polypeptide consists of the amino acid sequence of SEQ ID NO: 1588. In some embodiments, the polypeptide consists of the amino acid sequence of SEQ ID NO: 1589. In some embodiments, the polypeptide consists of the amino acid sequence of SEQ ID NO: 1590. In some embodiments, the polypeptide consists of the amino acid sequence of SEQ ID NO: 1591. In some embodiments, the polypeptide consists of the amino acid sequence of SEQ ID NO: 1592. In some embodiments, the polypeptide consists of the amino acid sequence of SEQ ID NO: 1593. In some embodiments, the polypeptide consists of the amino acid sequence of SEQ ID NO: 1594. In some embodiments, the polypeptide consists of the amino acid sequence of SEQ ID NO: 1595. In some embodiments, the polypeptide consists of the amino acid sequence of SEQ ID NO: 1596. In some embodiments, the polypeptide consists of the amino acid sequence of SEQ ID NO: 1597. In some embodiments, the polypeptide consists of the amino acid sequence of SEQ ID NO: 1598. In some embodiments, the polypeptide consists of the amino acid sequence of SEQ ID NO: 1599. In some embodiments, the polypeptide consists of the amino acid sequence of SEQ ID NO: 1600. In some embodiments, the polypeptide consists of the amino acid sequence of SEQ ID NO: 1601. In some embodiments, the polypeptide consists of the amino acid sequence of SEQ ID NO: 1602. In some embodiments, the polypeptide consists of the amino acid sequence of SEQ ID NO: 1603. In some embodiments, the polypeptide consists of the amino acid sequence of SEQ ID NO: 1604. In some embodiments, the polypeptide consists of the amino acid sequence of SEQ ID NO: 1605. In some embodiments, the polypeptide consists of the amino acid sequence of SEQ ID NO: 1606. In some embodiments, the polypeptide consists of the amino acid sequence of SEQ ID NO: 1607. In some embodiments, the polypeptide consists of the amino acid sequence of SEQ ID NO: 1608. In some embodiments, the polypeptide consists of the amino acid sequence of SEQ ID NO: 1609. In some embodiments, the polypeptide consists of the amino acid sequence of SEQ ID NO: 1610. In some embodiments, the polypeptide consists of the amino acid sequence of SEQ ID NO: 1611. In some embodiments, the polypeptide consists of the amino acid sequence of SEQ ID NO: 1612. In some embodiments, the polypeptide consists of the amino acid sequence of SEQ ID NO: 1613. In some embodiments, the polypeptide consists of the amino acid sequence of SEQ ID NO: 1614. In some embodiments, the polypeptide consists of the amino acid sequence of SEQ ID NO: 1615. In some embodiments, the polypeptide consists of the amino acid sequence of SEQ ID NO: 1616. In some embodiments, the polypeptide consists of the amino acid sequence of SEQ ID NO: 1617. In some embodiments, the polypeptide consists of the amino acid sequence of SEQ ID NO: 1618. In some embodiments, the polypeptide consists of the amino acid sequence of SEQ ID NO: 1619. In some embodiments, the polypeptide consists of the amino acid sequence of SEQ ID NO: 1620. In some embodiments, the polypeptide consists of the amino acid sequence of SEQ ID NO: 1621. In some embodiments, the polypeptide consists of the amino acid sequence of SEQ ID NO: 1622. In some embodiments, the polypeptide consists of the amino acid sequence of SEQ ID NO: 1623. In some embodiments, the polypeptide consists of the amino acid sequence of SEQ ID NO: 1624. In some embodiments, the polypeptide consists of the amino acid sequence of SEQ ID NO: 1625. In some embodiments, the polypeptide consists of the amino acid sequence of SEQ ID NO: 1626. In some embodiments, the polypeptide consists of the amino acid sequence of SEQ ID NO: 1627.

[0732] In some embodiments, the polypeptide consists of the amino acid sequence of SEQ ID NO: 1747. In some embodiments, the polypeptide consists of the amino acid sequence of SEQ ID NO: 1748. In some embodiments, the polypeptide consists of the amino acid sequence of SEQ ID NO: 1749. In some embodiments, the polypeptide consists of the amino acid sequence of SEQ ID NO: 1750. In some embodiments, the polypeptide consists of the amino acid sequence of SEQ ID NO: 1751. In some embodiments, the polypeptide consists of the amino acid sequence of SEQ ID NO: 1752. In some embodiments, the polypeptide consists of the amino acid sequence of SEQ ID NO: 1753. In some embodiments, the polypeptide consists of the amino acid sequence of SEQ ID NO: 1754. In some embodiments, the polypeptide consists of the amino acid sequence of SEQ ID NO: 1755. In some embodiments, the polypeptide consists of the amino acid sequence of SEQ ID NO: 1756. In some embodiments, the polypeptide consists of the amino acid sequence of SEQ ID NO: 1757. In some embodiments, the polypeptide consists of the amino acid sequence of SEQ ID NO: 1758. In some embodiments, the polypeptide consists of the amino acid sequence of SEQ ID NO: 1759. In some embodiments, the polypeptide consists of the amino acid sequence of SEQ ID NO: 1760. In some embodiments, the polypeptide consists of the amino acid sequence of SEQ ID NO: 1761. In some embodiments, the polypeptide consists of the amino acid sequence of SEQ ID NO: 1762. In some embodiments, the polypeptide consists of the amino acid sequence of SEQ ID NO: 1763. In some embodiments, the polypeptide consists of the amino acid sequence of SEQ ID NO: 1764. In some embodiments, the polypeptide consists of the amino acid sequence of SEQ ID NO: 1765. In some embodiments, the polypeptide consists of the amino acid sequence of SEQ ID NO: 1766. In some embodiments, the polypeptide consists of the amino acid sequence of SEQ ID NO: 1767. In some embodiments, the polypeptide consists of the amino acid sequence of SEQ ID NO: 1768. In some embodiments, the polypeptide consists of the amino acid sequence of SEQ ID NO: 1769. In some embodiments, the polypeptide consists of the amino acid sequence of SEQ ID NO: 1770. In some embodiments, the polypeptide consists of the amino acid sequence of SEQ ID NO: 1771. In some embodiments, the polypeptide consists of the amino acid sequence of SEQ ID NO: 1772. In some embodiments, the polypeptide consists of the amino acid sequence of SEQ ID NO: 1773. In some embodiments, the polypeptide consists of the amino acid sequence of SEQ ID NO: 1774. In some embodiments, the polypeptide consists of the amino acid sequence of SEQ ID NO: 1775. In some embodiments, the polypeptide consists of the amino acid sequence of SEQ ID NO: 1776. In some embodiments, the polypeptide consists of the amino acid sequence of SEQ ID NO: 1777. In some embodiments, the polypeptide consists of the amino acid sequence of SEQ ID NO: 1778. In some embodiments, the polypeptide consists of the amino acid sequence of SEQ ID NO: 1779. In some embodiments, the polypeptide consists of the amino acid sequence of SEQ ID NO: 1780. In some embodiments, the polypeptide consists of the amino acid sequence of SEQ ID NO: 1781. In some embodiments, the polypeptide consists of the amino acid sequence of SEQ ID NO: 1782. In some embodiments, the polypeptide consists of the amino acid sequence of SEQ ID NO: 1783. In some embodiments, the polypeptide consists of the amino acid sequence of SEQ ID NO: 1784. In some embodiments, the polypeptide consists of the amino acid sequence of SEQ ID NO: 1785. In some embodiments, the polypeptide consists of the amino acid sequence of SEQ ID NO: 1786. In some embodiments, the polypeptide consists of the amino acid sequence of SEQ ID NO: 1787. In some embodiments, the polypeptide consists of the amino acid sequence of SEQ ID NO: 1788. In some embodiments, the polypeptide consists of the amino acid sequence of SEQ ID NO: 1789. In some embodiments, the polypeptide consists of the amino acid sequence of SEQ ID NO: 1790. In some embodiments, the polypeptide consists of the amino acid sequence of SEQ ID NO: 1791. In some embodiments, the polypeptide consists of the amino acid sequence of SEQ ID NO: 1792. In some embodiments, the polypeptide consists of the amino acid sequence of SEQ ID NO: 1793. In some embodiments, the polypeptide consists of the amino acid sequence of SEQ ID NO: 1794. In some embodiments, the polypeptide consists of the amino acid sequence of SEQ ID NO: 1795. In some embodiments, the polypeptide consists of the amino acid sequence of SEQ ID NO: 1796. In some embodiments, the polypeptide consists of the amino acid sequence of SEQ ID NO: 1797. In some embodiments, the polypeptide consists of the amino acid sequence of SEQ ID NO: 1798. In some embodiments, the polypeptide consists of the amino acid sequence of SEQ ID NO: 1799. In some embodiments, the polypeptide consists of the amino acid sequence of SEQ ID NO: 1800. In some embodiments, the polypeptide consists of the amino acid sequence of SEQ ID NO: 1801. In some embodiments, the polypeptide consists of the amino acid sequence of SEQ ID NO: 1802. In some embodiments, the polypeptide consists of the amino acid sequence of SEQ ID NO: 1803. In some embodiments, the polypeptide consists of the amino acid sequence of SEQ ID NO: 1804. In some embodiments, the polypeptide consists of the amino acid sequence of SEQ ID NO: 1805. In some embodiments, the polypeptide consists of the amino acid sequence of SEQ ID NO: 1806. In some embodiments, the polypeptide consists of the amino acid sequence of SEQ ID NO: 1807. In some embodiments, the polypeptide consists of the amino acid sequence of SEQ ID NO: 1808. In some embodiments, the polypeptide consists of the amino acid sequence of SEQ ID NO: 1809. In some embodiments, the polypeptide consists of the amino acid sequence of SEQ ID NO: 1810. In some embodiments, the polypeptide consists of the amino acid sequence of SEQ ID NO: 1811. In some embodiments, the polypeptide consists of the amino acid sequence of SEQ ID NO: 1812. In some embodiments, the polypeptide consists of the amino acid sequence of SEQ ID NO: 1813. In some embodiments, the polypeptide consists of the amino acid sequence of SEQ ID NO: 1814. In some embodiments, the polypeptide consists of the amino acid sequence of SEQ ID NO: 1815. In some embodiments, the polypeptide consists of the amino acid sequence of SEQ ID NO: 1816. In some embodiments, the polypeptide consists of the amino acid sequence of SEQ ID NO: 1817. In some embodiments, the polypeptide consists of the amino acid sequence of SEQ ID NO: 1818. In some embodiments, the polypeptide consists of the amino acid sequence of SEQ ID NO: 1819. In some embodiments, the polypeptide consists of the amino acid sequence of SEQ ID NO: 1820. In some embodiments, the polypeptide consists of the amino acid sequence of SEQ ID NO: 1821. In some embodiments, the polypeptide consists of the amino acid sequence of SEQ ID NO: 1822. In some embodiments, the polypeptide consists of the amino acid sequence of SEQ ID NO: 1823. In some embodiments, the polypeptide consists of the amino acid sequence of SEQ ID NO: 1824. In some embodiments, the polypeptide consists of the amino acid sequence of SEQ ID NO: 1825. In some embodiments, the polypeptide consists of the amino acid sequence of SEQ ID NO: 1826. In some embodiments, the polypeptide consists of the amino acid sequence of SEQ ID NO: 1827. In some embodiments, the polypeptide consists of the amino acid sequence of SEQ ID NO: 1828. In some embodiments, the polypeptide consists of the amino acid sequence of SEQ ID NO: 1829. In some embodiments, the polypeptide consists of the amino acid sequence of SEQ ID NO: 1830. In some embodiments, the polypeptide consists of the amino acid sequence of SEQ ID NO: 1831. In some embodiments, the polypeptide consists of the amino acid sequence of SEQ ID NO: 1832. In some embodiments, the polypeptide consists of the amino acid sequence of SEQ ID NO: 1833. In some embodiments, the polypeptide consists of the amino acid sequence of SEQ ID NO: 1834. In some embodiments, the polypeptide consists of the amino acid sequence of SEQ ID NO: 1835. In some embodiments, the polypeptide consists of the amino acid sequence of SEQ ID NO: 1836. In some embodiments, the polypeptide consists of the amino acid sequence of SEQ ID NO: 1837. In some embodiments, the polypeptide consists of the amino acid sequence of SEQ ID NO: 1838. In some embodiments, the polypeptide consists of the amino acid sequence of SEQ ID NO: 1839. In some embodiments, the polypeptide consists of the amino acid sequence of SEQ ID NO: 1840. In some embodiments, the polypeptide consists of the amino acid sequence of SEQ ID NO: 1859. In some embodiments, the polypeptide consists of the amino acid sequence of SEQ ID NO: 1860. In some embodiments, the polypeptide consists of the amino acid sequence of SEQ ID NO: 1861. In some embodiments, the polypeptide consists of the amino acid sequence of SEQ ID NO: 1862. In some embodiments, the polypeptide consists of the amino acid sequence of SEQ ID NO: 1879. In some embodiments, the polypeptide consists of the amino acid sequence of SEQ ID NO: 1880. In some embodiments, the polypeptide consists of the amino acid sequence of SEQ ID NO: 1881.

[0733] In some embodiments, the polypeptide consists of the amino acid sequence of any one of SEQ ID NOs: 1587, 1592, 1615, 1626, 1818, 1822, 1825, or 1826. In some embodiments, the polypeptide consists of the amino acid sequence of any one of SEQ ID NOs: 1587, 1592, 1615, or 1626. In some embodiments, the polypeptide comprises the amino acid sequence of any one of SEQ ID NOs: 1626, 1818, 1822, 1825, or 1826.

[0734] In some embodiments, the polypeptide consists of the amino acid sequence of any one of SEQ ID NOs: 1596, 1597, 1615, 1626, 1818, 1822, 1825, or 1826. In some embodiments, the polypeptide consists of the amino acid sequence of any one of SEQ ID NOs: 1596, 1597, 1615, or 1626.

[0735] In some embodiments, the polypeptide agonizes human GCGR (“hGCGR”). In some embodiments, the hGCGR comprises the amino acid sequence of SEQ ID NO: 1576.

[0736] In some embodiments, the polypeptide has a hGCGR EC₅₀ of less than or equal to 1 nM.

[0737] In some embodiments, the polypeptide has a hGCGR EC₅₀ of less than or equal to 500 pM (e.g., less than or equal to 475 pM, less than or equal to 450 pM, less than or equal to 425 pM, less than or equal to 400 pM, less than or equal to 375 pM, less than or equal to 350 pM, less than or equal to 325 pM, less than or equal to 300 pM, less than or equal to 275 pM, less than or equal to 250 pM, less than or equal to 225 pM, less than or equal to 200 pM, less than or equal to 175 pM, less than or equal to 150 pM, less than or equal to 125 pM, less than or equal to 100 pM). In some embodiments, the hGCGR EC₅₀ is measured in a functional assay described in “EXAMPLE 1: GCG Receptor Agonist Activity.”

[0738] In some embodiments, the polypeptide has a hGCGR EC₅₀ of 50 pM, 55 pM, 60 pM, 65 pM, 70 pM, 75 pM, 80 pM, 85 pM, 90 pM, 95 pM, 100 pM, 105 pM, 110 pM, 115 pM, 120 pM, 125 pM, 130 pM, 135 pM, 140 pM, 145 pM, 150 pM, 155 pM, 200 pM, 205 pM, 210 pM, 215 pM, 220 pM, 225 pM, 230 pM, 235 pM, 240 pM, 245 pM, 250 pM, 255 pM, 260 pM, 265 pM, 270 pM, 275 pM, 280 pM, 285 pM, 290 pM, 295 pM, 300 pM, 305 pM, 310 pM, 315 pM, 320 pM, 325 pM, 330 pM, 335 pM, 340 pM, 345 pM, 350 pM, 355 pM, 360 pM, 365 pM, 370 pM, 375 pM, 380 pM, 385 pM, 390 pM, 395 pM, 400 pM, 405 pM, 410 pM, 415 pM, 420 pM, 425 pM, 430 pM, 435 pM, 440 pM, 445 pM, 450 pM, 455 pM, 460 pM, 465 pM, 470 pM, 475 pM, 480 pM, 485 pM, 490 pM, 495 pM, or 500 pM. In some embodiments, the hGCGR EC₅₀ is measured in a functional assay described in “EXAMPLE 1: GCG Receptor Agonist Activity.”

[0739] In some embodiments, the polypeptide has a human glucagon-like peptide-1 receptor (“hGLP-1R”) EC₅₀:hGCGR EC₅₀ ratio of at least 30:1. In some embodiments, the polypeptide has a hGLP-1R EC₅₀:hGCGR EC₅₀ ratio of at least 40:1. In some embodiments, the polypeptide has a hGLP-1R EC₅₀:hGCGR EC₅₀ ratio of at least 50:1. In some embodiments, the polypeptide has a hGLP-1R EC₅₀:hGCGR EC₅₀ ratio of at least 60:1. In some embodiments, the polypeptide has a hGLP-1R EC₅₀:hGCGR EC₅₀ ratio of at least 70:1. In some embodiments, the polypeptide has a hGLP-1R EC₅₀:hGCGR EC₅₀ ratio of at least 80:1. In some embodiments, the polypeptide has a hGLP-1R EC₅₀:hGCGR EC₅₀ ratio of at least 90:1. In some embodiments, the polypeptide has a hGLP-1R EC₅₀:hGCGR EC₅₀ ratio of at least 100:1. In some embodiments, the polypeptide has a hGLP-1R EC₅₀:hGCGR EC₅₀ ratio of at least 150:1. In some embodiments, the polypeptide has a hGLP-1R EC₅₀:hGCGR EC₅₀ ratio of at least 200:1. In some embodiments, the polypeptide has a hGLP-1R EC₅₀:hGCGR EC₅₀ ratio of at least 250:1. In some embodiments, the polypeptide has a hGLP-1R EC₅₀:hGCGR EC₅₀ ratio of at least 300:1. In some embodiments, the polypeptide has a hGLP-1R EC₅₀:hGCGR EC₅₀ ratio of at least 350:1. In some embodiments, the polypeptide has a hGLP-1R EC₅₀:hGCGR EC₅₀ ratio of at least 400:1. In some embodiments, the polypeptide has a hGLP-1R EC₅₀:hGCGR EC₅₀ ratio of at least 450:1. In some embodiments, the polypeptide has a hGLP-1R EC₅₀:hGCGR EC₅₀ ratio of at least 500:1. In some embodiments, the polypeptide has a hGLP-1R EC₅₀:hGCGR EC₅₀ ratio of at least 550:1. In some embodiments, the polypeptide has a hGLP-1R EC₅₀:hGCGR EC₅₀ ratio of at least 650:1. In some embodiments, the polypeptide has a hGLP-1R EC₅₀:hGCGR EC₅₀ ratio of at least 700:1. In some embodiments, the polypeptide has a hGLP-1R EC₅₀:hGCGR EC₅₀ ratio of at least 750:1. In some embodiments, the polypeptide has a hGLP-1R EC₅₀:hGCGR EC₅₀ ratio of at least 800:1. In some embodiments, the polypeptide has a hGLP-1R EC₅₀:hGCGR EC₅₀ ratio of at least 850:1. In some embodiments, the polypeptide has a hGLP-1R EC₅₀:hGCGR EC₅₀ ratio of at least 900:1. In some embodiments, the polypeptide has a hGLP-1R EC₅₀:hGCGR EC₅₀ ratio of at least 950:1. In some embodiments, the polypeptide has a hGLP-1R EC₅₀:hGCGR EC₅₀ ratio of at least 1000:1. In some embodiments, the hGCGR EC₅₀ is measured in a functional assay described in “EXAMPLE 1: GCG Receptor Agonist Activity” and the hGLP-1R EC₅₀ is measured in a functional assay described in “EXAMPLE 2: GLP-1 Receptor Agonist Activity.”

[0740] In some embodiments, the polypeptide has a hGLP-1R EC₅₀:hGCGR EC₅₀ ratio of 30:1, 40:1, 45:1, 50:1, 55:1, 60:1, 65:1, 70:1, 75:1, 80:1, 85:1, 90:1, 95:1, 100:1, 125:1, 150:1, 175:1, 200:1, 225:1, 250:1, 275:1, 300:1, 325:1, 350:1, 375:1, 400:1, 425:1, 450:1, 475:1, 500:1, 525:1, 550:1, 575:1, 600:1, 625:1, 650:1, 675:1, 700:1, 725:1, 750:1, 775:1, 800:1, 825:1, 850:1, 875:1, 900:1, 925:1, 950:1, 975:1, or 1000:1. In some embodiments, the hGCGR EC₅₀ is measured in a functional assay described in “EXAMPLE 1: GCG Receptor Agonist Activity” and the hGLP-1R EC₅₀ is measured in a functional assay described in “EXAMPLE 2: GLP-1 Receptor Agonist Activity.”

[0741] The present disclosure further provides molecules in which a polypeptide agonist disclosed herein is conjugated to a linker moiety, such as, e.g., a linker polypeptide. Linker moieties, including linker polypeptides, are discussed in more detail below. Such linker moieties include, for example, the linker sequences of any one of SEQ ID NOs: 1628-1683, 1739-1746, or 1841-1852. If desired, such molecules can be further conjugated to another molecule via the linker moiety. To facilitate such conjugation reactions, the polypeptide agonist may be derivatized.

[0742] For example, provided herein is a molecule comprising a first polypeptide that agonizes a glucagon receptor (“GCGR”) selected from the polypeptides provided herein (e.g., polypeptides comprising the amino acid sequence of any one of SEQ ID NOs: 1587-1627, 1747-1840, 1859-1862, or 1879-1881; SEQ ID NOs: 1587-1627 or 1747; SEQ ID NOs: 1587-1627; SEQ ID NOs: 1748-1840, 1859-1862, or 1879-1881); and a second polypeptide comprising the amino acid sequence of any one of SEQ ID NOs: 1628-1683, 1739-1746, or 1841-1852 (e.g., SEQ ID NOs: 1587-1627, 1747-1749, 1751-1792, 1794-1798, 1801-1830, 1833-1840, 1859-1862, or 1879-1881), wherein the C-terminus of the second polypeptide is covalently linked to an ε-amino group of a lysine residue of the first polypeptide, such as, e.g., a molecule comprising a first polypeptide that agonizes a glucagon receptor (“GCGR”) selected from the polypeptides provided herein (e.g., polypeptides comprising the amino acid sequence of any one of SEQ ID NOs: 1587-1627, 1747-1840, 1859-1862, or 1879-1881; SEQ ID NOs: 1587-1627 or 1747; SEQ ID NOs: 1587-1627; SEQ ID NOs: 1748-1840, 1859-1862, or 1879-1881); and a second polypeptide comprising the amino acid sequence of any one of SEQ ID NOs: 1628-1683, wherein the C-terminus of the second polypeptide is covalently linked to an ε-amino group of a lysine residue of the first polypeptide. For example, in some embodiments, a lysine residue of the first polypeptide and the C-terminus of the second polypeptide are covalently linked by an amide bond.

[0743] Illustratively, in some embodiments, the first polypeptide and the second polypeptide are covalently linked by an amide bond formed by the condensation of an ε-amino group of a lysine residue of the first polypeptide and a carboxyl group of the C-terminus of the second polypeptide.

[0744] In some embodiments, the molecule is a branched polypeptide. In some embodiments, the molecule is a branched peptide.

[0745] In some embodiments, the C-terminus of the second polypeptide is covalently linked to the ε-amino group of a lysine at position 21, position 24, position 28, or position 31 of the first polypeptide (e.g., a lysine residue at position 21, position 24, position 28, or position 31 of the first polypeptide is covalently linked to the C-terminus of the second polypeptide by an amide bond, e.g., an amide bond formed by the condensation of an ε-amino group of a lysine residue of the first polypeptide and a carboxyl group of the C-terminus of the second polypeptide). In some embodiments, the C-terminus of the second polypeptide is covalently linked to the β-amino group of a lysine at position 24 or position 28 of the first polypeptide (e.g., a lysine residue at position 24 or position 28 of the first polypeptide is covalently linked to the C-terminus of the second polypeptide by an amide bond, e.g., an amide bond formed by the condensation of an ε-amino group of a lysine residue of the first polypeptide and a carboxyl group of the C-terminus of the second polypeptide). In some embodiments, the C-terminus of the second polypeptide is covalently linked to the ε-amino group of a lysine at position 21 of the first polypeptide. In some embodiments, the C-terminus of the second polypeptide is covalently linked to the ε-amino group of a lysine at position 24 of the first polypeptide. In some embodiments, the C-terminus of the second polypeptide is covalently linked to the ε-amino group of a lysine at position 28 of the first polypeptide. In some embodiments, the C-terminus of the second polypeptide is covalently linked to the ε-amino group of a lysine at position 31 of the first polypeptide.

[0746] In some embodiments, the first polypeptide comprises at least 25 amino acids, wherein: the first polypeptide comprises 5-bromo-tryptophan at position 25; and the first polypeptide has at least 79% (e.g., at least 82%, at least 86%, at least 89%, at least 93%, at least 96%) sequence identity to the amino acid sequence of SEQ ID NO: 1587. In some embodiments, the first polypeptide comprises SEQ ID NO: 1587. In some embodiments, the first polypeptide consists of SEQ ID NO: 1587.

[0747] In some embodiments, the first polypeptide comprises at least 28 amino acids, wherein: the first polypeptide comprises 2-aminoisobutyric acid at position 16 and lysine, serine, or aspartic acid at position 28; and the first polypeptide has at least 89% (e.g., at least 93%, at least 96%) sequence identity to the amino acid sequence of SEQ ID NO: 1596. In some embodiments, the first polypeptide comprises SEQ ID NO: 1596. In some embodiments, the first polypeptide consists of SEQ ID NO: 1596.

[0748] In some embodiments, the first polypeptide comprises at least 28 amino acids, wherein: the first polypeptide comprises 2-aminoisobutyric acid at position 16, leucine at position 27, and lysine at position 28; and the first polypeptide has at least 89% (e.g., at least 93%, at least 96%) sequence identity to the amino acid sequence of SEQ ID NO: 1615. In some embodiments, the first polypeptide comprises SEQ ID NO: 1615. In some embodiments, the first polypeptide consists of SEQ ID NO: 1615.

[0749] In some embodiments, the first polypeptide comprises at least 28 amino acids, wherein: the first polypeptide comprises 2-aminoisobutyric acid at position 16, aspartic acid at position 24, and lysine at position 28; and the first polypeptide has at least 89% (e.g., at least 93%, at least 96%) sequence identity to the amino acid sequence of SEQ ID NO: 1626.

[0750] In some embodiments, the first polypeptide comprises SEQ ID NO: 1626. In some embodiments, the first polypeptide consists of SEQ ID NO: 1626.

[0751] In some embodiments, the first polypeptide comprises at least 28 amino acids, wherein the first polypeptide comprises a d-serine at position 2 and a 2-aminoisobutyric acid at position 16; and the first polypeptide has at least 89% (e.g., at least 93%, at least 96%) sequence identity to the amino acid sequence of SEQ ID NO: 1822. In some embodiments, the first polypeptide comprises SEQ ID NO: 1822. In some embodiments, the first polypeptide consists of SEQ ID NO: 1822.

[0752] In some embodiments, the first polypeptide comprises the amino acid sequence of any one of SEQ ID NOs: 1587-1627, 1747-1840, 1859-1862, or 1879-1881. In some embodiments, the first polypeptide comprises the amino acid sequence of any one of SEQ ID NOs: 1587-1627. In some embodiments, the first polypeptide comprises the amino acid sequence of any one of SEQ ID NOs: 1587-1627 or 1747. In some embodiments, the first polypeptide comprises the amino acid sequence of any one of SEQ ID NOs: 1748-1840, 1859-1862, or 1879-1881.

[0753] In some embodiments, the first polypeptide consists of the amino acid sequence of any one of SEQ ID NOs: 1587-1627, 1747-1840, 1859-1862, or 1879-1881. In some embodiments, the first polypeptide consists of the amino acid sequence of any one of SEQ ID NOs: 1587-1627. In some embodiments, the first polypeptide consists of the amino acid sequence of any one of SEQ ID NOs: 1587-1627 or 1747. In some embodiments, the first polypeptide consists of the amino acid sequence of any one of SEQ ID NOs: 1748-1840, 1859-1862, or 1879-1881.

[0754] In some embodiments, the first polypeptide comprises the amino acid sequence of SEQ ID NO: 1587. In some embodiments, the first polypeptide comprises the amino acid sequence of SEQ ID NO: 1588. In some embodiments, the first polypeptide comprises the amino acid sequence of SEQ ID NO: 1589. In some embodiments, the first polypeptide comprises the amino acid sequence of SEQ ID NO: 1590. In some embodiments, the first polypeptide comprises the amino acid sequence of SEQ ID NO: 1591. In some embodiments, the first polypeptide comprises the amino acid sequence of SEQ ID NO: 1592. In some embodiments, the first polypeptide comprises the amino acid sequence of SEQ ID NO: 1593.

[0755] In some embodiments, the first polypeptide comprises the amino acid sequence of SEQ ID NO: 1594. In some embodiments, the first polypeptide comprises the amino acid sequence of SEQ ID NO: 1595. In some embodiments, the first polypeptide comprises the amino acid sequence of SEQ ID NO: 1596. In some embodiments, the first polypeptide comprises the amino acid sequence of SEQ ID NO: 1597. In some embodiments, the first polypeptide comprises the amino acid sequence of SEQ ID NO: 1598. In some embodiments, the first polypeptide comprises the amino acid sequence of SEQ ID NO: 1599. In some embodiments, the first polypeptide comprises the amino acid sequence of SEQ ID NO: 1600. In some embodiments, the first polypeptide comprises the amino acid sequence of SEQ ID NO: 1601. In some embodiments, the first polypeptide comprises the amino acid sequence of SEQ ID NO: 1602. In some embodiments, the first polypeptide comprises the amino acid sequence of SEQ ID NO: 1603. In some embodiments, the first polypeptide comprises the amino acid sequence of SEQ ID NO: 1604. In some embodiments, the first polypeptide comprises the amino acid sequence of SEQ ID NO: 1605. In some embodiments, the first polypeptide comprises the amino acid sequence of SEQ ID NO: 1606. In some embodiments, the first polypeptide comprises the amino acid sequence of SEQ ID NO: 1607. In some embodiments, the first polypeptide comprises the amino acid sequence of SEQ ID NO: 1608. In some embodiments, the first polypeptide comprises the amino acid sequence of SEQ ID NO: 1609. In some embodiments, the first polypeptide comprises the amino acid sequence of SEQ ID NO: 1610. In some embodiments, the first polypeptide comprises the amino acid sequence of SEQ ID NO: 1611. In some embodiments, the first polypeptide comprises the amino acid sequence of SEQ ID NO: 1612. In some embodiments, the first polypeptide comprises the amino acid sequence of SEQ ID NO: 1613. In some embodiments, the first polypeptide comprises the amino acid sequence of SEQ ID NO: 1614. In some embodiments, the first polypeptide comprises the amino acid sequence of SEQ ID NO: 1615. In some embodiments, the first polypeptide comprises the amino acid sequence of SEQ ID NO: 1616. In some embodiments, the first polypeptide comprises the amino acid sequence of SEQ ID NO: 1617. In some embodiments, the first polypeptide comprises the amino acid sequence of SEQ ID NO: 1618. In some embodiments, the first polypeptide comprises the amino acid sequence of SEQ ID NO: 1619. In some embodiments, the first polypeptide comprises the amino acid sequence of SEQ ID NO: 1620. In some embodiments, the first polypeptide comprises the amino acid sequence of SEQ ID NO: 1621. In some embodiments, the first polypeptide comprises the amino acid sequence of SEQ ID NO: 1622. In some embodiments, the first polypeptide comprises the amino acid sequence of SEQ ID NO: 1623. In some embodiments, the first polypeptide comprises the amino acid sequence of SEQ ID NO: 1624. In some embodiments, the first polypeptide comprises the amino acid sequence of SEQ ID NO: 1625. In some embodiments, the first polypeptide comprises the amino acid sequence of SEQ ID NO: 1626. In some embodiments, the first polypeptide comprises the amino acid sequence of SEQ ID NO: 1627.

[0756] In some embodiments, the first polypeptide comprises the amino acid sequence of SEQ ID NO: 1747. In some embodiments, the first polypeptide comprises the amino acid sequence of SEQ ID NO: 1748. In some embodiments, the first polypeptide comprises the amino acid sequence of SEQ ID NO: 1749. In some embodiments, the first polypeptide comprises the amino acid sequence of SEQ ID NO: 1750. In some embodiments, the first polypeptide comprises the amino acid sequence of SEQ ID NO: 1751. In some embodiments, the first polypeptide comprises the amino acid sequence of SEQ ID NO: 1752. In some embodiments, the first polypeptide comprises the amino acid sequence of SEQ ID NO: 1753. In some embodiments, the first polypeptide comprises the amino acid sequence of SEQ ID NO: 1754. In some embodiments, the first polypeptide comprises the amino acid sequence of SEQ ID NO: 1755. In some embodiments, the first polypeptide comprises the amino acid sequence of SEQ ID NO: 1756. In some embodiments, the first polypeptide comprises the amino acid sequence of SEQ ID NO: 1757. In some embodiments, the first polypeptide comprises the amino acid sequence of SEQ ID NO: 1758. In some embodiments, the first polypeptide comprises the amino acid sequence of SEQ ID NO: 1759. In some embodiments, the first polypeptide comprises the amino acid sequence of SEQ ID NO: 1760. In some embodiments, the first polypeptide comprises the amino acid sequence of SEQ ID NO: 1761. In some embodiments, the first polypeptide comprises the amino acid sequence of SEQ ID NO: 1762. In some embodiments, the first polypeptide comprises the amino acid sequence of SEQ ID NO: 1763. In some embodiments, the first polypeptide comprises the amino acid sequence of SEQ ID NO: 1764. In some embodiments, the first polypeptide comprises the amino acid sequence of SEQ ID NO: 1765. In some embodiments, the first polypeptide comprises the amino acid sequence of SEQ ID NO: 1766. In some embodiments, the first polypeptide comprises the amino acid sequence of SEQ ID NO: 1767. In some embodiments, the first polypeptide comprises the amino acid sequence of SEQ ID NO: 1768. In some embodiments, the first polypeptide comprises the amino acid sequence of SEQ ID NO: 1769. In some embodiments, the first polypeptide comprises the amino acid sequence of SEQ ID NO: 1770. In some embodiments, the first polypeptide comprises the amino acid sequence of SEQ ID NO: 1771. In some embodiments, the first polypeptide comprises the amino acid sequence of SEQ ID NO: 1772. In some embodiments, the first polypeptide comprises the amino acid sequence of SEQ ID NO: 1773. In some embodiments, the first polypeptide comprises the amino acid sequence of SEQ ID NO: 1774. In some embodiments, the first polypeptide comprises the amino acid sequence of SEQ ID NO: 1775. In some embodiments, the first polypeptide comprises the amino acid sequence of SEQ ID NO: 1776. In some embodiments, the first polypeptide comprises the amino acid sequence of SEQ ID NO: 1777. In some embodiments, the first polypeptide comprises the amino acid sequence of SEQ ID NO: 1778. In some embodiments, the first polypeptide comprises the amino acid sequence of SEQ ID NO: 1779. In some embodiments, the first polypeptide comprises the amino acid sequence of SEQ ID NO: 1780. In some embodiments, the first polypeptide comprises the amino acid sequence of SEQ ID NO: 1781. In some embodiments, the first polypeptide comprises the amino acid sequence of SEQ ID NO: 1782. In some embodiments, the first polypeptide comprises the amino acid sequence of SEQ ID NO: 1783. In some embodiments, the first polypeptide comprises the amino acid sequence of SEQ ID NO: 1784. In some embodiments, the first polypeptide comprises the amino acid sequence of SEQ ID NO: 1785. In some embodiments, the first polypeptide comprises the amino acid sequence of SEQ ID NO: 1786. In some embodiments, the first polypeptide comprises the amino acid sequence of SEQ ID NO: 1787. In some embodiments, the first polypeptide comprises the amino acid sequence of SEQ ID NO: 1788. In some embodiments, the first polypeptide comprises the amino acid sequence of SEQ ID NO: 1789. In some embodiments, the first polypeptide comprises the amino acid sequence of SEQ ID NO: 1790. In some embodiments, the first polypeptide comprises the amino acid sequence of SEQ ID NO: 1791. In some embodiments, the first polypeptide comprises the amino acid sequence of SEQ ID NO: 1792. In some embodiments, the first polypeptide comprises the amino acid sequence of SEQ ID NO: 1793. In some embodiments, the first polypeptide comprises the amino acid sequence of SEQ ID NO: 1794. In some embodiments, the first polypeptide comprises the amino acid sequence of SEQ ID NO: 1795. In some embodiments, the first polypeptide comprises the amino acid sequence of SEQ ID NO: 1796. In some embodiments, the first polypeptide comprises the amino acid sequence of SEQ ID NO: 1797. In some embodiments, the first polypeptide comprises the amino acid sequence of SEQ ID NO: 1798. In some embodiments, the first polypeptide comprises the amino acid sequence of SEQ ID NO: 1799. In some embodiments, the first polypeptide comprises the amino acid sequence of SEQ ID NO: 1800. In some embodiments, the first polypeptide comprises the amino acid sequence of SEQ ID NO: 1801. In some embodiments, the first polypeptide comprises the amino acid sequence of SEQ ID NO: 1802. In some embodiments, the first polypeptide comprises the amino acid sequence of SEQ ID NO: 1803. In some embodiments, the first polypeptide comprises the amino acid sequence of SEQ ID NO: 1804. In some embodiments, the first polypeptide comprises the amino acid sequence of SEQ ID NO: 1805. In some embodiments, the first polypeptide comprises the amino acid sequence of SEQ ID NO: 1806. In some embodiments, the first polypeptide comprises the amino acid sequence of SEQ ID NO: 1807. In some embodiments, the first polypeptide comprises the amino acid sequence of SEQ ID NO: 1808. In some embodiments, the first polypeptide comprises the amino acid sequence of SEQ ID NO: 1809. In some embodiments, the first polypeptide comprises the amino acid sequence of SEQ ID NO: 1810. In some embodiments, the first polypeptide comprises the amino acid sequence of SEQ ID NO: 1811. In some embodiments, the first polypeptide comprises the amino acid sequence of SEQ ID NO: 1812. In some embodiments, the first polypeptide comprises the amino acid sequence of SEQ ID NO: 1813. In some embodiments, the first polypeptide comprises the amino acid sequence of SEQ ID NO: 1814. In some embodiments, the first polypeptide comprises the amino acid sequence of SEQ ID NO: 1815. In some embodiments, the first polypeptide comprises the amino acid sequence of SEQ ID NO: 1816. In some embodiments, the first polypeptide comprises the amino acid sequence of SEQ ID NO: 1817. In some embodiments, the first polypeptide comprises the amino acid sequence of SEQ ID NO: 1818. In some embodiments, the first polypeptide comprises the amino acid sequence of SEQ ID NO: 1819. In some embodiments, the first polypeptide comprises the amino acid sequence of SEQ ID NO: 1820. In some embodiments, the first polypeptide comprises the amino acid sequence of SEQ ID NO: 1821. In some embodiments, the first polypeptide comprises the amino acid sequence of SEQ ID NO: 1822. In some embodiments, the first polypeptide comprises the amino acid sequence of SEQ ID NO: 1823. In some embodiments, the first polypeptide comprises the amino acid sequence of SEQ ID NO: 1824. In some embodiments, the first polypeptide comprises the amino acid sequence of SEQ ID NO: 1825. In some embodiments, the first polypeptide comprises the amino acid sequence of SEQ ID NO: 1826. In some embodiments, the first polypeptide comprises the amino acid sequence of SEQ ID NO: 1827. In some embodiments, the first polypeptide comprises the amino acid sequence of SEQ ID NO: 1828. In some embodiments, the first polypeptide comprises the amino acid sequence of SEQ ID NO: 1829. In some embodiments, the first polypeptide comprises the amino acid sequence of SEQ ID NO: 1830. In some embodiments, the first polypeptide comprises the amino acid sequence of SEQ ID NO: 1831. In some embodiments, the first polypeptide comprises the amino acid sequence of SEQ ID NO: 1832. In some embodiments, the first polypeptide comprises the amino acid sequence of SEQ ID NO: 1833. In some embodiments, the first polypeptide comprises the amino acid sequence of SEQ ID NO: 1834. In some embodiments, the first polypeptide comprises the amino acid sequence of SEQ ID NO: 1835. In some embodiments, the first polypeptide comprises the amino acid sequence of SEQ ID NO: 1836. In some embodiments, the first polypeptide comprises the amino acid sequence of SEQ ID NO: 1837. In some embodiments, the first polypeptide comprises the amino acid sequence of SEQ ID NO: 1838. In some embodiments, the first polypeptide comprises the amino acid sequence of SEQ ID NO: 1839. In some embodiments, the first polypeptide comprises the amino acid sequence of SEQ ID NO: 1840. In some embodiments, the first polypeptide comprises the amino acid sequence of SEQ ID NO: 1859. In some embodiments, the first polypeptide comprises the amino acid sequence of SEQ ID NO: 1860. In some embodiments, the first polypeptide comprises the amino acid sequence of SEQ ID NO: 1861. In some embodiments, the first polypeptide comprises the amino acid sequence of SEQ ID NO: 1862. In some embodiments, the first polypeptide comprises the amino acid sequence of SEQ ID NO: 1879. In some embodiments, the first polypeptide comprises the amino acid sequence of SEQ ID NO: 1880. In some embodiments, the first polypeptide comprises the amino acid sequence of SEQ ID NO: 1881.

[0757] In some embodiments, the first polypeptide comprises the amino acid sequence of any one of SEQ ID NOs: 1596, 1597, 1615, 1626, 1818, 1822, 1825, or 1826. In some embodiments, the first polypeptide comprises the amino acid sequence of any one of SEQ ID NOs: 1596, 1597, 1615, or 1626. In some embodiments, the first polypeptide comprises the amino acid sequence of any one of SEQ ID NOs: 1626, 1818, 1822, 1825, or 1826.

[0758] In some embodiments, the polypeptide comprises the amino acid sequence of any one of SEQ ID NOs: 1587, 1592, 1615, 1626, 1818, 1822, 1825, or 1826. In some embodiments, the polypeptide comprises the amino acid sequence of any one of SEQ ID NOs: 1587, 1592, 1615, or 1626.

[0759] In some embodiments, the first polypeptide consists of the amino acid sequence of SEQ ID NO: 1587. In some embodiments, the first polypeptide consists of the amino acid sequence of SEQ ID NO: 1588. In some embodiments, the first polypeptide consists of the amino acid sequence of SEQ ID NO: 1589. In some embodiments, the first polypeptide consists of the amino acid sequence of SEQ ID NO: 1590. In some embodiments, the first polypeptide consists of the amino acid sequence of SEQ ID NO: 1591. In some embodiments, the first polypeptide consists of the amino acid sequence of SEQ ID NO: 1592. In some embodiments, the first polypeptide consists of the amino acid sequence of SEQ ID NO: 1593. In some embodiments, the first polypeptide consists of the amino acid sequence of SEQ ID NO: 1594. In some embodiments, the first polypeptide consists of the amino acid sequence of SEQ ID NO: 1595. In some embodiments, the first polypeptide consists of the amino acid sequence of SEQ ID NO: 1596. In some embodiments, the first polypeptide consists of the amino acid sequence of SEQ ID NO: 1597. In some embodiments, the first polypeptide consists of the amino acid sequence of SEQ ID NO: 1598. In some embodiments, the first polypeptide consists of the amino acid sequence of SEQ ID NO: 1599. In some embodiments, the first polypeptide consists of the amino acid sequence of SEQ ID NO: 1600. In some embodiments, the first polypeptide consists of the amino acid sequence of SEQ ID NO: 1601. In some embodiments, the first polypeptide consists of the amino acid sequence of SEQ ID NO: 1602. In some embodiments, the first polypeptide consists of the amino acid sequence of SEQ ID NO: 1603. In some embodiments, the first polypeptide consists of the amino acid sequence of SEQ ID NO: 1604. In some embodiments, the first polypeptide consists of the amino acid sequence of SEQ ID NO: 1605. In some embodiments, the first polypeptide consists of the amino acid sequence of SEQ ID NO: 1606. In some embodiments, the first polypeptide consists of the amino acid sequence of SEQ ID NO: 1607. In some embodiments, the first polypeptide consists of the amino acid sequence of SEQ ID NO: 1608. In some embodiments, the first polypeptide consists of the amino acid sequence of SEQ ID NO: 1609. In some embodiments, the first polypeptide consists of the amino acid sequence of SEQ ID NO: 1610. In some embodiments, the first polypeptide consists of the amino acid sequence of SEQ ID NO: 1611. In some embodiments, the first polypeptide consists of the amino acid sequence of SEQ ID NO: 1612. In some embodiments, the first polypeptide consists of the amino acid sequence of SEQ ID NO: 1613. In some embodiments, the first polypeptide consists of the amino acid sequence of SEQ ID NO: 1614. In some embodiments, the first polypeptide consists of the amino acid sequence of SEQ ID NO: 1615. In some embodiments, the first polypeptide consists of the amino acid sequence of SEQ ID NO: 1616. In some embodiments, the first polypeptide consists of the amino acid sequence of SEQ ID NO: 1617. In some embodiments, the first polypeptide consists of the amino acid sequence of SEQ ID NO: 1618. In some embodiments, the first polypeptide consists of the amino acid sequence of SEQ ID NO: 1619. In some embodiments, the first polypeptide consists of the amino acid sequence of SEQ ID NO: 1620. In some embodiments, the first polypeptide consists of the amino acid sequence of SEQ ID NO: 1621. In some embodiments, the first polypeptide consists of the amino acid sequence of SEQ ID NO: 1622. In some embodiments, the first polypeptide consists of the amino acid sequence of SEQ ID NO: 1623. In some embodiments, the first polypeptide consists of the amino acid sequence of SEQ ID NO: 1624. In some embodiments, the first polypeptide consists of the amino acid sequence of SEQ ID NO: 1625. In some embodiments, the first polypeptide consists of the amino acid sequence of SEQ ID NO: 1626. In some embodiments, the first polypeptide consists of the amino acid sequence of SEQ ID NO: 1627.

[0760] In some embodiments, the first polypeptide consists of the amino acid sequence of SEQ ID NO: 1747. In some embodiments, the first polypeptide consists of the amino acid sequence of SEQ ID NO: 1748. In some embodiments, the first polypeptide consists of the amino acid sequence of SEQ ID NO: 1749. In some embodiments, the first polypeptide consists of the amino acid sequence of SEQ ID NO: 1750. In some embodiments, the first polypeptide consists of the amino acid sequence of SEQ ID NO: 1751. In some embodiments, the first polypeptide consists of the amino acid sequence of SEQ ID NO: 1752. In some embodiments, the first polypeptide consists of the amino acid sequence of SEQ ID NO: 1753. In some embodiments, the first polypeptide consists of the amino acid sequence of SEQ ID NO: 1754. In some embodiments, the first polypeptide consists of the amino acid sequence of SEQ ID NO: 1755. In some embodiments, the first polypeptide consists of the amino acid sequence of SEQ ID NO: 1756. In some embodiments, the first polypeptide consists of the amino acid sequence of SEQ ID NO: 1757. In some embodiments, the first polypeptide consists of the amino acid sequence of SEQ ID NO: 1758. In some embodiments, the first polypeptide consists of the amino acid sequence of SEQ ID NO: 1759. In some embodiments, the first polypeptide consists of the amino acid sequence of SEQ ID NO: 1760. In some embodiments, the first polypeptide consists of the amino acid sequence of SEQ ID NO: 1761. In some embodiments, the first polypeptide consists of the amino acid sequence of SEQ ID NO: 1762. In some embodiments, the first polypeptide consists of the amino acid sequence of SEQ ID NO: 1763. In some embodiments, the first polypeptide consists of the amino acid sequence of SEQ ID NO: 1764. In some embodiments, the first polypeptide consists of the amino acid sequence of SEQ ID NO: 1765. In some embodiments, the first polypeptide consists of the amino acid sequence of SEQ ID NO: 1766. In some embodiments, the first polypeptide consists of the amino acid sequence of SEQ ID NO: 1767. In some embodiments, the first polypeptide consists of the amino acid sequence of SEQ ID NO: 1768. In some embodiments, the first polypeptide consists of the amino acid sequence of SEQ ID NO: 1769. In some embodiments, the first polypeptide consists of the amino acid sequence of SEQ ID NO: 1770. In some embodiments, the first polypeptide consists of the amino acid sequence of SEQ ID NO: 1771. In some embodiments, the first polypeptide consists of the amino acid sequence of SEQ ID NO: 1772. In some embodiments, the first polypeptide consists of the amino acid sequence of SEQ ID NO: 1773. In some embodiments, the first polypeptide consists of the amino acid sequence of SEQ ID NO: 1774. In some embodiments, the first polypeptide consists of the amino acid sequence of SEQ ID NO: 1775. In some embodiments, the first polypeptide consists of the amino acid sequence of SEQ ID NO: 1776. In some embodiments, the first polypeptide consists of the amino acid sequence of SEQ ID NO: 1777. In some embodiments, the first polypeptide consists of the amino acid sequence of SEQ ID NO: 1778. In some embodiments, the first polypeptide consists of the amino acid sequence of SEQ ID NO: 1779. In some embodiments, the first polypeptide consists of the amino acid sequence of SEQ ID NO: 1780. In some embodiments, the first polypeptide consists of the amino acid sequence of SEQ ID NO: 1781. In some embodiments, the first polypeptide consists of the amino acid sequence of SEQ ID NO: 1782. In some embodiments, the first polypeptide consists of the amino acid sequence of SEQ ID NO: 1783. In some embodiments, the first polypeptide consists of the amino acid sequence of SEQ ID NO: 1784. In some embodiments, the first polypeptide consists of the amino acid sequence of SEQ ID NO: 1785. In some embodiments, the first polypeptide consists of the amino acid sequence of SEQ ID NO: 1786. In some embodiments, the first polypeptide consists of the amino acid sequence of SEQ ID NO: 1787. In some embodiments, the first polypeptide consists of the amino acid sequence of SEQ ID NO: 1788. In some embodiments, the first polypeptide consists of the amino acid sequence of SEQ ID NO: 1789. In some embodiments, the first polypeptide consists of the amino acid sequence of SEQ ID NO: 1790. In some embodiments, the first polypeptide consists of the amino acid sequence of SEQ ID NO: 1791. In some embodiments, the first polypeptide consists of the amino acid sequence of SEQ ID NO: 1792. In some embodiments, the first polypeptide consists of the amino acid sequence of SEQ ID NO: 1793. In some embodiments, the first polypeptide consists of the amino acid sequence of SEQ ID NO: 1794. In some embodiments, the first polypeptide consists of the amino acid sequence of SEQ ID NO: 1795. In some embodiments, the first polypeptide consists of the amino acid sequence of SEQ ID NO: 1796. In some embodiments, the first polypeptide consists of the amino acid sequence of SEQ ID NO: 1797. In some embodiments, the first polypeptide consists of the amino acid sequence of SEQ ID NO: 1798. In some embodiments, the first polypeptide consists of the amino acid sequence of SEQ ID NO: 1799. In some embodiments, the first polypeptide consists of the amino acid sequence of SEQ ID NO: 1800. In some embodiments, the first polypeptide consists of the amino acid sequence of SEQ ID NO: 1801. In some embodiments, the first polypeptide consists of the amino acid sequence of SEQ ID NO: 1802. In some embodiments, the first polypeptide consists of the amino acid sequence of SEQ ID NO: 1803. In some embodiments, the first polypeptide consists of the amino acid sequence of SEQ ID NO: 1804. In some embodiments, the first polypeptide consists of the amino acid sequence of SEQ ID NO: 1805. In some embodiments, the first polypeptide consists of the amino acid sequence of SEQ ID NO: 1806. In some embodiments, the first polypeptide consists of the amino acid sequence of SEQ ID NO: 1807. In some embodiments, the first polypeptide consists of the amino acid sequence of SEQ ID NO: 1808. In some embodiments, the first polypeptide consists of the amino acid sequence of SEQ ID NO: 1809. In some embodiments, the first polypeptide consists of the amino acid sequence of SEQ ID NO: 1810. In some embodiments, the first polypeptide consists of the amino acid sequence of SEQ ID NO: 1811. In some embodiments, the first polypeptide consists of the amino acid sequence of SEQ ID NO: 1812. In some embodiments, the first polypeptide consists of the amino acid sequence of SEQ ID NO: 1813. In some embodiments, the first polypeptide consists of the amino acid sequence of SEQ ID NO: 1814. In some embodiments, the first polypeptide consists of the amino acid sequence of SEQ ID NO: 1815. In some embodiments, the first polypeptide consists of the amino acid sequence of SEQ ID NO: 1816. In some embodiments, the first polypeptide consists of the amino acid sequence of SEQ ID NO: 1817. In some embodiments, the first polypeptide consists of the amino acid sequence of SEQ ID NO: 1818. In some embodiments, the first polypeptide consists of the amino acid sequence of SEQ ID NO: 1819. In some embodiments, the first polypeptide consists of the amino acid sequence of SEQ ID NO: 1820. In some embodiments, the first polypeptide consists of the amino acid sequence of SEQ ID NO: 1821. In some embodiments, the first polypeptide consists of the amino acid sequence of SEQ ID NO: 1822. In some embodiments, the first polypeptide consists of the amino acid sequence of SEQ ID NO: 1823. In some embodiments, the first polypeptide consists of the amino acid sequence of SEQ ID NO: 1824. In some embodiments, the first polypeptide consists of the amino acid sequence of SEQ ID NO: 1825. In some embodiments, the first polypeptide consists of the amino acid sequence of SEQ ID NO: 1826. In some embodiments, the first polypeptide consists of the amino acid sequence of SEQ ID NO: 1827. In some embodiments, the first polypeptide consists of the amino acid sequence of SEQ ID NO: 1828. In some embodiments, the first polypeptide consists of the amino acid sequence of SEQ ID NO: 1829. In some embodiments, the first polypeptide consists of the amino acid sequence of SEQ ID NO: 1830. In some embodiments, the first polypeptide consists of the amino acid sequence of SEQ ID NO: 1831. In some embodiments, the first polypeptide consists of the amino acid sequence of SEQ ID NO: 1832. In some embodiments, the first polypeptide consists of the amino acid sequence of SEQ ID NO: 1833. In some embodiments, the first polypeptide consists of the amino acid sequence of SEQ ID NO: 1834. In some embodiments, the first polypeptide consists of the amino acid sequence of SEQ ID NO: 1835. In some embodiments, the first polypeptide consists of the amino acid sequence of SEQ ID NO: 1836. In some embodiments, the first polypeptide consists of the amino acid sequence of SEQ ID NO: 1837. In some embodiments, the first polypeptide consists of the amino acid sequence of SEQ ID NO: 1838. In some embodiments, the first polypeptide consists of the amino acid sequence of SEQ ID NO: 1839. In some embodiments, the first polypeptide consists of the amino acid sequence of SEQ ID NO: 1840. In some embodiments, the first polypeptide consists of the amino acid sequence of SEQ ID NO: 1859. In some embodiments, the first polypeptide consists of the amino acid sequence of SEQ ID NO: 1860. In some embodiments, the first polypeptide consists of the amino acid sequence of SEQ ID NO: 1861. In some embodiments, the first polypeptide consists of the amino acid sequence of SEQ ID NO: 1862.

[0761] In some embodiments, the first polypeptide consists of the amino acid sequence of any one of SEQ ID NOs: 1596, 1597, 1615, 1626, 1818, 1822, 1825, or 1826. In some embodiments, the first polypeptide consists of the amino acid sequence of any one of SEQ ID NOs: 1596, 1597, 1615, or 1626. In some embodiments, the first polypeptide consists of the amino acid sequence of any one of SEQ ID NOs: 1626, 1818, 1822, 1825, or 1826.

[0762] In some embodiments, the first polypeptide consists of the amino acid sequence of any one of SEQ ID NOs: 1587, 1592, 1615, 1626, 1818, 1822, 1825, or 1826. In some embodiments, the first polypeptide consists of the amino acid sequence of any one of SEQ ID NOs: 1587, 1592, 1615, or 1626.

[0763] In some embodiments, the second polypeptide comprises the amino acid sequence of SEQ ID NO: 1628. In some embodiments, the second polypeptide comprises the amino acid sequence of SEQ ID NO: 1629. In some embodiments, the second polypeptide comprises the amino acid sequence of SEQ ID NO: 1630. In some embodiments, the second polypeptide comprises the amino acid sequence of SEQ ID NO: 1631. In some embodiments, the second polypeptide comprises the amino acid sequence of SEQ ID NO: 1632. In some embodiments, the second polypeptide comprises the amino acid sequence of SEQ ID NO: 1633. In some embodiments, the second polypeptide comprises the amino acid sequence of SEQ ID NO: 1634. In some embodiments, the second polypeptide comprises the amino acid sequence of SEQ ID NO: 1635. In some embodiments, the second polypeptide comprises the amino acid sequence of SEQ ID NO: 1636. In some embodiments, the second polypeptide comprises the amino acid sequence of SEQ ID NO: 1637. In some embodiments, the second polypeptide comprises the amino acid sequence of SEQ ID NO: 1638. In some embodiments, the second polypeptide comprises the amino acid sequence of SEQ ID NO: 1639. In some embodiments, the second polypeptide comprises the amino acid sequence of SEQ ID NO: 1640. In some embodiments, the second polypeptide comprises the amino acid sequence of SEQ ID NO: 1641. In some embodiments, the second polypeptide comprises the amino acid sequence of SEQ ID NO: 1642. In some embodiments, the second polypeptide comprises the amino acid sequence of SEQ ID NO: 1643. In some embodiments, the second polypeptide comprises the amino acid sequence of SEQ ID NO: 1644. In some embodiments, the second polypeptide comprises the amino acid sequence of SEQ ID NO: 1645. In some embodiments, the second polypeptide comprises the amino acid sequence of SEQ ID NO: 1646. In some embodiments, the second polypeptide comprises the amino acid sequence of SEQ ID NO: 1647. In some embodiments, the second polypeptide comprises the amino acid sequence of SEQ ID NO: 1648. In some embodiments, the second polypeptide comprises the amino acid sequence of SEQ ID NO: 1649. In some embodiments, the second polypeptide comprises the amino acid sequence of SEQ ID NO: 1650. In some embodiments, the second polypeptide comprises the amino acid sequence of SEQ ID NO: 1651. In some embodiments, the second polypeptide comprises the amino acid sequence of SEQ ID NO: 1652. In some embodiments, the second polypeptide comprises the amino acid sequence of SEQ ID NO: 1653. In some embodiments, the second polypeptide comprises the amino acid sequence of SEQ ID NO: 1654. In some embodiments, the second polypeptide comprises the amino acid sequence of SEQ ID NO: 1655. In some embodiments, the second polypeptide comprises the amino acid sequence of SEQ ID NO: 1656. In some embodiments, the second polypeptide comprises the amino acid sequence of SEQ ID NO: 1657. In some embodiments, the second polypeptide comprises the amino acid sequence of SEQ ID NO: 1658. In some embodiments, the second polypeptide comprises the amino acid sequence of SEQ ID NO: 1659. In some embodiments, the second polypeptide comprises the amino acid sequence of SEQ ID NO: 1660. In some embodiments, the second polypeptide comprises the amino acid sequence of SEQ ID NO: 1661. In some embodiments, the second polypeptide comprises the amino acid sequence of SEQ ID NO: 1662. In some embodiments, the second polypeptide comprises the amino acid sequence of SEQ ID NO: 1663. In some embodiments, the second polypeptide comprises the amino acid sequence of SEQ ID NO: 1664. In some embodiments, the second polypeptide comprises the amino acid sequence of SEQ ID NO: 1665. In some embodiments, the second polypeptide comprises the amino acid sequence of SEQ ID NO: 1666. In some embodiments, the second polypeptide comprises the amino acid sequence of SEQ ID NO: 1667. In some embodiments, the second polypeptide comprises the amino acid sequence of SEQ ID NO: 1668. In some embodiments, the second polypeptide comprises the amino acid sequence of SEQ ID NO: 1669. In some embodiments, the second polypeptide comprises the amino acid sequence of SEQ ID NO: 1670. In some embodiments, the second polypeptide comprises the amino acid sequence of SEQ ID NO: 1671. In some embodiments, the second polypeptide comprises the amino acid sequence of SEQ ID NO: 1672. In some embodiments, the second polypeptide comprises the amino acid sequence of SEQ ID NO: 1673. In some embodiments, the second polypeptide comprises the amino acid sequence of SEQ ID NO: 1674. In some embodiments, the second polypeptide comprises the amino acid sequence of SEQ ID NO: 1675. In some embodiments, the second polypeptide comprises the amino acid sequence of SEQ ID NO: 1676. In some embodiments, the second polypeptide comprises the amino acid sequence of SEQ ID NO: 1677. In some embodiments, the second polypeptide comprises the amino acid sequence of SEQ ID NO: 1678. In some embodiments, the second polypeptide comprises the amino acid sequence of SEQ ID NO: 1679. In some embodiments, the second polypeptide comprises the amino acid sequence of SEQ ID NO: 1680. In some embodiments, the second polypeptide comprises the amino acid sequence of SEQ ID NO: 1681. In some embodiments, the second polypeptide comprises the amino acid sequence of SEQ ID NO: 1682. In some embodiments, the second polypeptide comprises the amino acid sequence of SEQ ID NO: 1683. In some embodiments, the second polypeptide comprises the amino acid sequence of SEQ ID NO: 1739. In some embodiments, the second polypeptide comprises the amino acid sequence of SEQ ID NO: 1740. In some embodiments, the second polypeptide comprises the amino acid sequence of SEQ ID NO: 1741. In some embodiments, the second polypeptide comprises the amino acid sequence of SEQ ID NO: 1742. In some embodiments, the second polypeptide comprises the amino acid sequence of SEQ ID NO: 1743. In some embodiments, the second polypeptide comprises the amino acid sequence of SEQ ID NO: 1744. In some embodiments, the second polypeptide comprises the amino acid sequence of SEQ ID NO: 1745. In some embodiments, the second polypeptide comprises the amino acid sequence of SEQ ID NO: 1746. In some embodiments, the second polypeptide comprises the amino acid sequence of SEQ ID NO: 1841. In some embodiments, the second polypeptide comprises the amino acid sequence of SEQ ID NO: 1842. In some embodiments, the second polypeptide comprises the amino acid sequence of SEQ ID NO: 1843. In some embodiments, the second polypeptide comprises the amino acid sequence of SEQ ID NO: 1844. In some embodiments, the second polypeptide comprises the amino acid sequence of SEQ ID NO: 1845. In some embodiments, the second polypeptide comprises the amino acid sequence of SEQ ID NO: 1846. In some embodiments, the second polypeptide comprises the amino acid sequence of SEQ ID NO: 1847. In some embodiments, the second polypeptide comprises the amino acid sequence of SEQ ID NO: 1848. In some embodiments, the second polypeptide comprises the amino acid sequence of SEQ ID NO: 1849. In some embodiments, the second polypeptide comprises the amino acid sequence of SEQ ID NO: 1850. In some embodiments, the second polypeptide comprises the amino acid sequence of SEQ ID NO: 1851. In some embodiments, the second polypeptide comprises the amino acid sequence of SEQ ID NO: 1852.

[0764] In some embodiments, the second polypeptide comprises the amino acid sequence of SEQ ID NO: 1628-1630. In some embodiments, the second polypeptide comprises the amino acid sequence of SEQ ID NO: 1628. In some embodiments, the second polypeptide comprises the amino acid sequence of SEQ ID NO: 1629. In some embodiments, the second polypeptide comprises the amino acid sequence of SEQ ID NO: 1630.

[0765] In some embodiments, the first polypeptide comprises at least 25 amino acids, wherein: the first polypeptide comprises 5-bromo-tryptophan at position 25; and the first polypeptide has at least 79% (e.g., at least 82%, at least 86%, at least 89%, at least 93%, at least 96%) sequence identity to the amino acid sequence of SEQ ID NO: 1587; and the second polypeptide comprises the amino acid sequence of SEQ ID NO: 1628-1630. In some embodiments, the first polypeptide comprises SEQ ID NO: 1587; and the second polypeptide comprises the amino acid sequence of SEQ ID NO: 1628-1630. In some embodiments, the second polypeptide comprises the amino acid sequence of SEQ ID NO: 1628. In some embodiments, the second polypeptide comprises the amino acid sequence of SEQ ID NO: 1629. In some embodiments, the second polypeptide comprises the amino acid sequence of SEQ ID NO: 1630.

[0766] In some embodiments, the first polypeptide comprises at least 28 amino acids, wherein: the first polypeptide comprises 2-aminoisobutyric acid at position 16 and lysine, serine, or aspartic acid at position 28; and the first polypeptide has at least 89% (e.g., at least 93%, at least 96%) sequence identity to the amino acid sequence of SEQ ID NO: 1596; and the second polypeptide comprises the amino acid sequence of SEQ ID NO: 1628-1630. In some embodiments, the first polypeptide comprises SEQ ID NO: 1596; and the second polypeptide comprises the amino acid sequence of SEQ ID NO: 1628-1630. In some embodiments, the second polypeptide comprises the amino acid sequence of SEQ ID NO: 1628. In some embodiments, the second polypeptide comprises the amino acid sequence of SEQ ID NO: 1629. In some embodiments, the second polypeptide comprises the amino acid sequence of SEQ ID NO: 1630.

[0767] In some embodiments, the first polypeptide comprises at least 28 amino acids, wherein: the first polypeptide comprises 2-aminoisobutyric acid at position 16, leucine at position 27, and lysine at position 28; and the first polypeptide has at least 89% (e.g., at least 93%, at least 96%) sequence identity to the amino acid sequence of SEQ ID NO: 1615; and the second polypeptide comprises the amino acid sequence of SEQ ID NO: 1628-1630. In some embodiments, the first polypeptide comprises SEQ ID NO: 1615; and the second polypeptide comprises the amino acid sequence of SEQ ID NO: 1628-1630. In some embodiments, the second polypeptide comprises the amino acid sequence of SEQ ID NO: 1628. In some embodiments, the second polypeptide comprises the amino acid sequence of SEQ ID NO: 1629. In some embodiments, the second polypeptide comprises the amino acid sequence of SEQ ID NO: 1630.

[0768] In some embodiments, the first polypeptide comprises at least 28 amino acids, wherein: the first polypeptide comprises 2-aminoisobutyric acid at position 16, aspartic acid at position 24, and lysine at position 28; and the first polypeptide has at least 89% (e.g., at least 93%, at least 96%) sequence identity to the amino acid sequence of SEQ ID NO: 1626; and the second polypeptide comprises the amino acid sequence of SEQ ID NO: 1628-1630. In some embodiments, the first polypeptide comprises SEQ ID NO: 1626; and the second polypeptide comprises the amino acid sequence of SEQ ID NO: 1628-1630. In some embodiments, the second polypeptide comprises the amino acid sequence of SEQ ID NO: 1628. In some embodiments, the second polypeptide comprises the amino acid sequence of SEQ ID NO: 1629. In some embodiments, the second polypeptide comprises the amino acid sequence of SEQ ID NO: 1630.

[0769] In some embodiments, the first polypeptide comprises at least 28 amino acids, wherein: the first polypeptide comprises d-serine at position 2 and 2-aminoisobutyric acid at position 16; and the first polypeptide has at least 89% (e.g., at least 93%, at least 96%) sequence identity to the amino acid sequence of SEQ ID NO: 1822; and the second polypeptide comprises the amino acid sequence of SEQ ID NO: 1628-1630. In some embodiments, the first polypeptide comprises SEQ ID NO: 1822; and the second polypeptide comprises the amino acid sequence of SEQ ID NO: 1628-1630. In some embodiments, the second polypeptide comprises the amino acid sequence of SEQ ID NO: 1628. In some embodiments, the second polypeptide comprises the amino acid sequence of SEQ ID NO: 1629. In some embodiments, the second polypeptide comprises the amino acid sequence of SEQ ID NO: 1630.

[0770] In some embodiments, the first polypeptide comprises the amino acid sequence of any one of SEQ ID NOs: 1587 1627, 1747-1840, 1859-1862, or 1879-1881; and the second polypeptide comprises the amino acid sequence of SEQ ID NO: 1628-1630. In some embodiments, the second polypeptide comprises the amino acid sequence of SEQ ID NO: 1628. In some embodiments, the second polypeptide comprises the amino acid sequence of SEQ ID NO: 1629. In some embodiments, the second polypeptide comprises the amino acid sequence of SEQ ID NO: 1630.

[0771] In some embodiments, the first polypeptide comprises the amino acid sequence of any one of SEQ ID NOs: 1587-1627; and the second polypeptide comprises the amino acid sequence of SEQ ID NO: 1628-1630. In some embodiments, the second polypeptide comprises the amino acid sequence of SEQ ID NO: 1628. In some embodiments, the second polypeptide comprises the amino acid sequence of SEQ ID NO: 1629. In some embodiments, the second polypeptide comprises the amino acid sequence of SEQ ID NO: 1630.

[0772] In some embodiments, the first polypeptide comprises the amino acid sequence of any one of SEQ ID NOs: 1596, 1597, 1615, 1626, 1818, 1822, 1825, or 1826; and the second polypeptide comprises the amino acid sequence of SEQ ID NO: 1628-1630. In some embodiments, the second polypeptide comprises the amino acid sequence of SEQ ID NO: 1628. In some embodiments, the second polypeptide comprises the amino acid sequence of SEQ ID NO: 1629. In some embodiments, the second polypeptide comprises the amino acid sequence of SEQ ID NO: 1630.

[0773] In some embodiments, the first polypeptide comprises the amino acid sequence of any one of SEQ ID NOs: 1587, 1592, 1596, 1615, or 1626; and the second polypeptide comprises the amino acid sequence of SEQ ID NO: 1628-1630. In some embodiments, the first polypeptide comprises the amino acid sequence of any one of SEQ ID NOs: 1587, 1592, 1615, or 1626. In some embodiments, the second polypeptide comprises the amino acid sequence of SEQ ID NO: 1628. In some embodiments, the second polypeptide comprises the amino acid sequence of SEQ ID NO: 1629. In some embodiments, the second polypeptide comprises the amino acid sequence of SEQ ID NO: 1630.

[0774] In some embodiments, the first polypeptide comprises the amino acid sequence of any one of SEQ ID NOs: 1587, 1592, 1615, 1626, 1818, 1822, 1825, or 1826; and the second polypeptide comprises the amino acid sequence of SEQ ID NO: 1628-1630. In some embodiments, the second polypeptide comprises the amino acid sequence of SEQ ID NO: 1628. In some embodiments, the second polypeptide comprises the amino acid sequence of SEQ ID NO: 1629. In some embodiments, the second polypeptide comprises the amino acid sequence of SEQ ID NO: 1630.

[0775] In some embodiments, the first polypeptide comprises the amino acid sequence of any one of SEQ ID NOs: 1626, 1818, 1822, 1825, or 1826; and the second polypeptide comprises the amino acid sequence of SEQ ID NO: 1628-1630. In some embodiments, the second polypeptide comprises the amino acid sequence of SEQ ID NO: 1628. In some embodiments, the second polypeptide comprises the amino acid sequence of SEQ ID NO: 1629. In some embodiments, the second polypeptide comprises the amino acid sequence of SEQ ID NO: 1630.

[0776] In some embodiments, a polypeptide or molecule of this disclosure comprises SEQ ID NOs: 1863 and 1864, as illustrated below:

```
HsQGT FTSDY SKYLD [Aib] KRAQ DFVD[5-BrW] LLKT a
                                                                                      |
                              GGGGS GGGGS PAPAP APAPA PASGG,
```

wherein the solid line between the lysine (K) residue and the glycine (G) residue represents an amide bond formed by condensation of the ε-amino group of the lysine residue and the C-terminal carboxylic acid group of the glycine residue. In some embodiments, the N-terminal glycine residue of the molecule is optionally derivatized to facilitate conjugation to another molecule. In some embodiments, the N-terminal glycine residue of the molecule is bromoacetylated to facilitate a thiol-bromoacetyl reaction with a thiol group (e.g., of a cysteine residue).

[0777] In some embodiments, a polypeptide or molecule of this disclosure comprises SEQ ID NOs: 1865 and 1866, as illustrated below:

```
HsQGT FTSDY SKYLD [Aib] KRAQ DFVDW LLKT
                                                                          |
                  GSPAP APAPA PAPAP APAPA PASGG,
```

wherein the solid line between the lysine (K) residue and the glycine (G) residue represents an amide bond formed by condensation of the ε-amino group of the lysine residue and the C-terminal carboxylic acid group of the glycine residue. In some embodiments, the N-terminal glycine residue of the molecule is optionally derivatized to facilitate conjugation to another molecule. In some embodiments, the N-terminal glycine residue of the molecule is bromoacetylated to facilitate a thiol-bromoacetyl reaction with a thiol group (e.g., of a cysteine residue).

[0778] In some embodiments, a polypeptide or molecule of this disclosure comprises SEQ ID NOs: 1867 and 1868, as illustrated below:

```
HsQGT FTSDY SKYLD [Aib] KRAQ DFVDW LLKT
                                                                          |
                  GGGGS GGGGS PAPAP APAPA PASGG,
```

wherein the solid line between the lysine (K) residue and the glycine (G) residue represents an amide bond formed by condensation of the ε-amino group of the lysine residue and the C-terminal carboxylic acid group of the glycine residue. In some embodiments, the N-terminal glycine residue of the molecule is optionally derivatized to facilitate conjugation to another molecule. In some embodiments, the N-terminal glycine residue of the molecule is bromoacetylated to facilitate a thiol-bromoacetyl reaction with a thiol group (e.g., of a cysteine residue).

[0779] In some embodiments, a polypeptide or molecule of this disclosure comprises SEQ ID NOs: 1869 and 1870, as illustrated below:

```
HsQGT FTSDY SKYLD [Aib] KRAQ EFVEW LLKS A
                                                                          |
                  GGGGS GGGGS PAPAP APAPA PASGG,
```

wherein the solid line between the lysine (K) residue and the glycine (G) residue represents an amide bond formed by condensation of the ε-amino group of the lysine residue and the C-terminal carboxylic acid group of the glycine residue. In some embodiments, the N-terminal glycine residue of the molecule is optionally derivatized to facilitate conjugation to another molecule. In some embodiments, the N-terminal glycine residue of the molecule is bromoacetylated to facilitate a thiol-bromoacetyl reaction with a thiol group (e.g., of a cysteine residue).

[0780] In some embodiments, a molecule or polypeptide of this disclosure comprises the structure depicted in FIG. 9.

[0781] In some embodiments, a molecule or polypeptide of this disclosure comprises the structure depicted in FIG. 10.

[0782] In some embodiments, a molecule or polypeptide of this disclosure comprises the structure depicted in FIG. 11.

[0783] In some embodiments, a molecule or polypeptide of this disclosure comprises the structure depicted in FIG. 12.

[0784] In some embodiments, a molecule or polypeptide of this disclosure comprises the structure depicted in FIG. 13.

[0785] In some embodiments, a molecule or polypeptide of this disclosure comprises the structure depicted in FIG. 14.

[0786] In some embodiments, a molecule or polypeptide of this disclosure comprises the structure depicted in FIG. 15.

[0787] In some embodiments, a molecule or polypeptide of this disclosure comprises the structure depicted in FIG. 16.

[0788] Also provided herein is a molecule comprising a first polypeptide that agonizes a GCGR, wherein the first polypeptide is selected from those described herein (e.g., a polypeptide comprising the amino acid sequence of any one of SEQ ID NOs: 1587-1627, 1747-1840, 1859-1862, or 1879-1881; SEQ ID NOs: 1587-1627 or 1747; SEQ ID NOs: 1587-1627; SEQ ID NOs: 1748-1840, 1859-1862, or 1879-1881); and a second polypeptide comprising the amino acid sequence of any one of SEQ ID NOs: 1740-1746, 1841-1849, or 1852, wherein the C-terminal amino acid residue of the first polypeptide is covalently linked to the N-terminal amino acid residue of the second polypeptide. In some embodiments, the C-terminal amino acid residue of the second polypeptide is a lysine residue. In some embodiments, the C-terminal amino acid residue of the second polypeptide is modified for conjugation to a cysteine residue (e.g., bromoacetylated). In some embodiments, the C-terminal amino acid residue of the second polypeptide is a bromoacetylated lysine residue.

[0789] In some embodiments, the molecule is a branched polypeptide. In some embodiments, the molecule is a branched peptide.

[0790] In some embodiments, the molecule has a hGCGR EC₅₀ of less than or equal to 1 nM.

[0791] In some embodiments, the molecule has a hGCGR EC₅₀ of less than or equal to 500 pM (e.g., less than or equal to 475 pM, less than or equal to 450 pM, less than or equal to 425 pM, less than or equal to 400 pM, less than or equal to 375 pM, less than or equal to 350 pM, less than or equal to 325 pM, less than or equal to 300 pM, less than or equal to 275 pM, less than or equal to 250 pM, less than or equal to 225 pM, less than or equal to 200 pM, less than or equal to 175 pM, less than or equal to 150 pM, less than or equal to 125 pM, less than or equal to 100 pM). In some embodiments, the hGCGR EC₅₀ is measured in a functional assay described in “EXAMPLE 1: GCG Receptor Agonist Activity.”

[0792] In some embodiments, the molecule has a hGCGR EC₅₀ of 50 pM, 55 pM, 60 pM, 65 pM, 70 pM, 75 pM, 80 pM, 85 pM, 90 pM, 95 pM, 100 pM, 105 pM, 110 pM, 115 pM, 120 pM, 125 pM, 130 pM, 135 pM, 140 pM, 145 pM, 150 pM, 155 pM, 200 pM, 205 pM, 210 pM, 215 pM, 220 pM, 225 pM, 230 pM, 235 pM, 240 pM, 245 pM, 250 pM, 255 pM, 260 pM, 265 pM, 270 pM, 275 pM, 280 pM, 285 pM, 290 pM, 295 pM, 300 pM, 305 pM, 310 pM, 315 pM, 320 pM, 325 pM, 330 pM, 335 pM, 340 pM, 345 pM, 350 pM, 355 pM, 360 pM, 365 pM, 370 pM, 375 pM, 380 pM, 385 pM, 390 pM, 395 pM, 400 pM, 405 pM, 410 pM, 415 pM, 420 pM, 425 pM, 430 pM, 435 pM, 440 pM, 445 pM, 450 pM, 455 pM, 460 pM, 465 pM, 470 pM, 475 pM, 480 pM, 485 pM, 490 pM, 495 pM, or 500 pM. In some embodiments, the hGCGR EC₅₀ is measured in a functional assay described in “EXAMPLE 1: GCG Receptor Agonist Activity.”

[0793] In some embodiments, the molecule has a human glucagon-like peptide-1 receptor (“hGLP-1R”) EC₅₀:hGCGR EC₅₀ ratio of at least 30:1. In some embodiments, the molecule has a hGLP-1R EC₅₀:hGCGR EC₅₀ ratio of at least 40:1. In some embodiments, the molecule has a hGLP-1R EC₅₀:hGCGR EC₅₀ ratio of at least 50:1. In some embodiments, the molecule has a hGLP-1R EC₅₀:hGCGR EC₅₀ ratio of at least 60:1. In some embodiments, the molecule has a hGLP-1R EC₅₀:hGCGR EC₅₀ ratio of at least 70:1. In some embodiments, the molecule has a hGLP-1R EC₅₀:hGCGR EC₅₀ ratio of at least 80:1. In some embodiments, the molecule has a hGLP-1R EC₅₀:hGCGR EC₅₀ ratio of at least 90:1. In some embodiments, the molecule has a hGLP-1R EC₅₀:hGCGR EC₅₀ ratio of at least 100:1. In some embodiments, the molecule has a hGLP-1R EC₅₀:hGCGR EC₅₀ ratio of at least 150:1. In some embodiments, the molecule has a hGLP-1R EC₅₀:hGCGR EC₅₀ ratio of at least 200:1. In some embodiments, the molecule has a hGLP-1R EC₅₀:hGCGR EC₅₀ ratio of at least 250:1. In some embodiments, the molecule has a hGLP-1R EC₅₀:hGCGR EC₅₀ ratio of at least 300:1. In some embodiments, the molecule has a hGLP-1R EC₅₀:hGCGR EC₅₀ ratio of at least 350:1. In some embodiments, the molecule has a hGLP-1R EC₅₀:hGCGR EC₅₀ ratio of at least 400:1. In some embodiments, the molecule has a hGLP-1R EC₅₀:hGCGR EC₅₀ ratio of at least 450:1. In some embodiments, the molecule has a hGLP-1R EC₅₀:hGCGR EC₅₀ ratio of at least 500:1. In some embodiments, the molecule has a hGLP-1R EC₅₀:hGCGR EC₅₀ ratio of at least 550:1. In some embodiments, the molecule has a hGLP-1R EC₅₀:hGCGR EC₅₀ ratio of at least 650:1. In some embodiments, the molecule has a hGLP-1R EC₅₀:hGCGR EC₅₀ ratio of at least 700:1. In some embodiments, the molecule has a hGLP-1R EC₅₀:hGCGR EC₅₀ ratio of at least 750:1. In some embodiments, the molecule has a hGLP-1R EC₅₀:hGCGR EC₅₀ ratio of at least 800:1. In some embodiments, the molecule has a hGLP-1R EC₅₀:hGCGR EC₅₀ ratio of at least 850:1. In some embodiments, the molecule has a hGLP-1R EC₅₀:hGCGR EC₅₀ ratio of at least 900:1. In some embodiments, the molecule has a hGLP-1R EC₅₀:hGCGR EC₅₀ ratio of at least 950:1. In some embodiments, the molecule has a hGLP-1R EC₅₀:hGCGR EC₅₀ ratio of at least 1000:1. In some embodiments, the hGCGR EC₅₀ is measured in a functional assay described in “EXAMPLE 1: GCG Receptor Agonist Activity” and the hGLP-1R EC₅₀ is measured in a functional assay described in “EXAMPLE 2: GLP-1 Receptor Agonist Activity.”

[0794] In some embodiments, the molecule has a hGLP-1R EC₅₀:hGCGR EC₅₀ ratio of 30:1, 40:1, 45:1, 50:1, 55:1, 60:1, 65:1, 70:1, 75:1, 80:1, 85:1, 90:1, 95:1, 100:1, 125:1, 150:1, 175:1, 200:1, 225:1, 250:1, 275:1, 300:1, 325:1, 350:1, 375:1, 400:1, 425:1, 450:1, 475:1, 500:1, 525:1, 550:1, 575:1, 600:1, 625:1, 650:1, 675:1, 700:1, 725:1, 750:1, 775:1, 800:1, 825:1, 850:1, 875:1, 900:1, 925:1, 950:1, 975:1, or 1000:1. In some embodiments, the hGCGR EC₅₀ is measured in a functional assay described in “EXAMPLE 1: GCG Receptor Agonist Activity” and the hGLP-1R EC₅₀ is measured in a functional assay described in “EXAMPLE 2: GLP-1 Receptor Agonist Activity.”

[0795] Peptides described herein may be prepared by processes well-known in the art, e.g., peptide purification as described in Eng et al., J. Biol. Chem., 265:20259-62 (1990); standard solid-phase peptide synthesis techniques as described in Raufman et al., J. Biol. Chem., 267:21432-37 (1992) or liquid-phase peptide techniques as described in Sharma et al., Chem. Rev., 122(16):13516-13546 (2022); recombinant DNA techniques as described in Sambrook et al., Molecular Cloning: A Laboratory Manual, 2d Ed., Cold Spring Harbor (1989); and the like. Additionally, peptides provided herein can be chemically derivatized at one or more amino acid residues (e.g., N-terminal acetylation or C-terminal amidation) by known organic chemistry techniques.

Glucagon Receptor Agonist Conjugates with Half-Life Extending Domains

[0796] Provided herein is a molecule that comprises a polypeptide that agonizes a glucagon receptor (“GCGR”), wherein: the polypeptide is selected from the polypeptides described herein; and a half-life extending domain (e.g., an Fc-containing polypeptide). Such molecules can possess one or more desirable properties in addition to GCGR agonism, such as, e.g., an extended serum half-life.

[0797] Conjugation of a half-life extending domain to a polypeptide, either directly or via a linker moiety, can enable altered pharmacodynamics and pharmacokinetics relative to the unmodified polypeptide. For example, in some embodiments, a half-life extending domain can extend elimination half-time relative to the unmodified polypeptide. In addition, in some embodiments, a half-life extending domain can alter one or more pharmacodynamic properties of the polypeptide, such as, e.g., tissue distribution, penetration, or diffusion.

[0798] In some embodiments, the half-life extending domain is a molecule that specifically binds to a circulating plasma protein.

[0799] In some embodiments, the half-life extending domain is a molecule that specifically binds to an albumin. In some embodiments, the half-life extending domain is a polypeptide (e.g., an antibody, antibody fragment, or peptide) that specifically binds to an albumin.

[0800] In some embodiments, the half-life extending domain is a molecule that specifically binds to human serum albumin (HSA). In some embodiments, the half-life extending domain is a polypeptide (e.g., an antibody, antibody fragment, or peptide) that specifically binds to HSA.

[0801] In some embodiments, the half-life extending domain is HSA or a variant thereof.

[0802] In some embodiments, the half-life extending domain is a molecule that specifically binds to the neonatal Fc receptor (FcRn). In some embodiments, the half-life extending domain is a polypeptide (e.g., an antibody, antibody fragment, or peptide) that specifically binds to FcRn.

[0803] In some embodiments, the half-life extending domain is an Fc domain. In some embodiments, the half-life extending domain is an Fc domain described in Table S1 below. In some embodiments, the half-life extending domain comprises the amino acid sequence of SEQ ID NO: 1858.

[0804] In some embodiments, the half-life extending domain is an Fc-containing polypeptide. In some embodiments, the half-life extending domain is an antibody. In some embodiments, the half-life extending domain is an antibody fragment. In some embodiments, the half-life extending domain is an scFv.

[0805] In some embodiments, the half-life extending domain is a transferrin.

[0806] In some embodiments, the polypeptide comprises at least 25 amino acids, wherein: the polypeptide comprises 5-bromo-tryptophan at position 25; and the polypeptide has at least 79% (e.g., at least 82%, at least 86%, at least 89%, at least 93%, at least 96%) sequence identity to the amino acid sequence of SEQ ID NO: 1587. In some embodiments, the polypeptide comprises SEQ ID NO: 1587. In some embodiments, the polypeptide consists of SEQ ID NO: 1587.

[0807] In some embodiments, the polypeptide comprises at least 28 amino acids, wherein: the polypeptide comprises 2-aminoisobutyric acid at position 16 and lysine, serine, or aspartic acid at position 28; and the polypeptide has at least 89% (e.g., at least 93%, at least 96%) sequence identity to the amino acid sequence of SEQ ID NO: 1596. In some embodiments, the polypeptide comprises SEQ ID NO: 1596. In some embodiments, the polypeptide consists of SEQ ID NO: 1596.

[0808] In some embodiments, the polypeptide comprises at least 28 amino acids, wherein: the polypeptide comprises 2-aminoisobutyric acid at position 16, leucine at position 27, and lysine at position 28; and the polypeptide has at least 89% (e.g., at least 93%, at least 96%) sequence identity to the amino acid sequence of SEQ ID NO: 1615. In some embodiments, the polypeptide comprises SEQ ID NO: 1615. In some embodiments, the polypeptide consists of SEQ ID NO: 1615.

[0809] In some embodiments, the polypeptide comprises at least 28 amino acids, wherein: the polypeptide comprises 2-aminoisobutyric acid at position 16, aspartic acid at position 24, and lysine at position 28; and the polypeptide has at least 89% (e.g., at least 93%, at least 96%) sequence identity to the amino acid sequence of SEQ ID NO: 1626. In some embodiments, the polypeptide comprises SEQ ID NO: 1626. In some embodiments, the polypeptide consists of SEQ ID NO: 1626.

[0810] In some embodiments, the polypeptide comprises at least 28 amino acids, wherein: the polypeptide comprises d-serine at position 2 and 2-aminoisobutyric acid at position 16; and the polypeptide has at least 89% (e.g., at least 93%, at least 96%) sequence identity to the amino acid sequence of SEQ ID NO: 1822. In some embodiments, the polypeptide comprises SEQ ID NO: 1822. In some embodiments, the polypeptide consists of SEQ ID NO: 1822.

[0811] In some embodiments, the polypeptide comprises an amino acid sequence with between three and nine modifications relative to SEQ ID NO: 1576, wherein the modifications are selected from:
[0812] tyrosine and phenylalanine at position 1;
[0813] d-serine, 2-aminoisobutyric acid, and d-threonine at position 2;
[0814] glutamic acid at position 3;
[0815] histidine at position 7;
[0816] tryptophan at position 10;
[0817] glutamic acid at position 15;
[0818] 2-aminoisobutyric acid, glutamine, homophenylalanine, and glutamic acid at position 16;
[0819] lysine, citrulline, glutamine, and alanine at position 17;
[0820] 2-naphthylalanine, L-4,4′-biphenylalanine, alanine, citrulline, and lysine at position 18;
[0821] 4-chloro-L-phenylalanine, alanine, d-glutamine, homoserine, histidine, arginine, and glutamic acid at position 20;
[0822] glutamic acid, citrulline, and d-aspartic acid at position 21;
[0823] tryptophan and β-cyclohexyl-L-alanine at position 22;
[0824] aspartic acid, lysine, alanine, 2-aminoisobutyric acid, glycine, histidine, asparagine, threonine, d-glutamine, glutamic acid, arginine, phenylalanine, leucine, serine, tyrosine, valine, isoleucine, homoserine, and 2,3-diaminopropionic acid at position 24;
[0825] 5-bromo-L-tryptophan, tyrosine, L-beta-homotryptophan, 5-methoxy-L-tryptophan, 5-methyl-L-tryptophan, 6-bromo-L-tryptophan, 6-chloro-L-tryptophan, 6-methyl-L-tryptophan, and 7-bromo-L-tryptophan at position 25;
[0826] leucine, glutamic acid, and L-α-aminoadipic acid at position 27;
[0827] lysine, aspartic acid, serine, 6-azido-L-lysine, glutamic acid, and alanine at position 28;
[0828] glutamic acid, serine, aspartic acid, and alanine at position 29;
[0829] an additional amino acid at position 30, wherein the additional amino acid is lysine; and
[0830] an additional amino acid at position 31, wherein the additional amino acid is lysine.

[0831] In some embodiments, the modifications comprise a d-serine at position 2, a 2-aminoisobutyric acid at position 16, and between one and seven other modifications at position 1, 3, 7, 10, 15, 17, 18, 20, 21, 22, 24, 25, 26, 27, 28, 29, 30, or 31 (e.g., at position 17, 21, 24, 25, 27, 28, or 29) as described above. In some embodiments, the modifications are selected from:
[0832] lysine at position 17;
[0833] glutamic acid at position 21;
[0834] lysine, alanine, and glutamic acid at position 24;
[0835] 5-bromo-L-tryptophan at position 25;
[0836] leucine and glutamic acid at position 27;
[0837] lysine, aspartic acid, and glutamic acid at position 28; and
[0838] glutamic acid and serine at position 29.

[0839] In some embodiments, the polypeptide comprises the amino acid sequence of any one of SEQ ID NOs: 1587-1627, 1747-1840, 1859-1862, or 1879-1881. In some embodiments, the polypeptide comprises the amino acid sequence of any one of SEQ ID NOs: 1587-1627 or 1747. In some embodiments, the polypeptide comprises the amino acid sequence of any one of SEQ ID NOs: 1747-1840, 1859-1862, or 1879-1881. In some embodiments, the polypeptide consists of the amino acid sequence of any one of SEQ ID NOs: 1587-1627, 1747-1840, 1859-1862, or 1879-1881. In some embodiments, the polypeptide consists of the amino acid sequence of any one of SEQ ID NOs: 1587-1627 or 1747. In some embodiments, the polypeptide consists of the amino acid sequence of any one of SEQ ID NOs: 1747-1840, 1859-1862, or 1879-1881.

[0840] In some embodiments, the polypeptide comprises the amino acid sequence of any one of SEQ ID NOs: 1587-1627. In some embodiments, the polypeptide consists of the amino acid sequence of any one of SEQ ID NOs: 1587-1627.

[0841] In some embodiments, the polypeptide comprises the amino acid sequence of any one of SEQ ID NOs: 1596, 1597, 1615, 1626, 1818, 1822, 1825, or 1826. In some embodiments, the polypeptide comprises the amino acid sequence of any one of SEQ ID NOs: 1587, 1592, 1596, 1615, or 1626. In some embodiments, the polypeptide comprises the amino acid sequence of any one of SEQ ID NOs: 1626, 1818, 1822, 1825, or 1826.

[0842] In some embodiments, the polypeptide comprises the amino acid sequence of SEQ ID NO: 1587. In some embodiments, the polypeptide comprises the amino acid sequence of SEQ ID NO: 1592. In some embodiments, the polypeptide comprises the amino acid sequence of SEQ ID NO: 1596. In some embodiments, the polypeptide comprises the amino acid sequence of SEQ ID NO: 1615. In some embodiments, the polypeptide comprises the amino acid sequence of SEQ ID NO: 1626.

[0843] In some embodiments, the polypeptide comprises the amino acid sequence of any one of SEQ ID NOs: 1588 or 1596-1611. In some embodiments, the polypeptide comprises the amino acid sequence of SEQ ID NO: 1588. In some embodiments, the polypeptide comprises the amino acid sequence of SEQ ID NO: 1596. In some embodiments, the polypeptide comprises the amino acid sequence of SEQ ID NO: 1597. In some embodiments, the polypeptide comprises the amino acid sequence of SEQ ID NO: 1598. In some embodiments, the polypeptide comprises the amino acid sequence of SEQ ID NO: 1599. In some embodiments, the polypeptide comprises the amino acid sequence of SEQ ID NO: 1600. In some embodiments, the polypeptide comprises the amino acid sequence of SEQ ID NO: 1601. In some embodiments, the polypeptide comprises the amino acid sequence of SEQ ID NO: 1602. In some embodiments, the polypeptide comprises the amino acid sequence of SEQ ID NO: 1603. In some embodiments, the polypeptide comprises the amino acid sequence of SEQ ID NO: 1604. In some embodiments, the polypeptide comprises the amino acid sequence of SEQ ID NO: 1605. In some embodiments, the polypeptide comprises the amino acid sequence of SEQ ID NO: 1606. In some embodiments, the polypeptide comprises the amino acid sequence of SEQ ID NO: 1607. In some embodiments, the polypeptide comprises the amino acid sequence of SEQ ID NO: 1608. In some embodiments, the polypeptide comprises the amino acid sequence of SEQ ID NO: 1609. In some embodiments, the polypeptide comprises the amino acid sequence of SEQ ID NO: 1610. In some embodiments, the polypeptide comprises the amino acid sequence of SEQ ID NO: 1611.

[0844] In some embodiments, the half-life extending domain (e.g., the Fc-containing polypeptide) is conjugated, i.e., covalently bound, directly to an amino acid residue of the polypeptide agonist, or optionally, to a peptidyl or non-peptidyl linker moiety (including, but not limited to, aromatic or aryl linkers) that is covalently bound to an amino acid residue of the polypeptide agonist. For example, in some embodiments, an β-amino group of a lysine residue of the polypeptide is covalently linked to a C-terminus of a linker polypeptide; and an N-terminus of the linker polypeptide is conjugated to a cysteine residue of a half-life extending domain (e.g., an Fc-containing polypeptide). Illustratively, in some embodiments, a lysine residue of the polypeptide is covalently linked to a C-terminus of a linker polypeptide via an amide bond, e.g., an amide bond formed by condensation of an ε-amino group of a lysine residue and a carboxyl group of a C-terminus of a polypeptide linker. Additionally, in some embodiments, the N-terminus of the linker polypeptide is derivatized. For example, in some embodiments, the N-terminus of the linker polypeptide is acetylated, such as when a thioether linkage connects an acetylated N-terminus of the linker polypeptide and the cysteine residue of the half-life extending domain (e.g., the Fc-containing polypeptide), wherein the thioether linkage comprises a sulfur atom of the cysteine residue.

[0845] Alternatively, in some embodiments, the C-terminal amino acid residue of the polypeptide is covalently linked to the N-terminal amino acid residue of the linker polypeptide. In some embodiments, the C-terminus of the linker polypeptide is derivatized. In some embodiments, the C-terminal amino acid residue of the linker polypeptide is modified for coupling to a cysteine residue (e.g., is bromoacetylated). Illustratively, in some embodiments, the C-terminus of the linker polypeptide is acetylated, such as when a thioether linkage connects an acetylated C-terminus of the linker polypeptide and the cysteine residue of the half-life extending domain (e.g., the Fc-containing polypeptide), wherein the thioether linkage comprises a sulfur atom of the cysteine residue.

[0846] In some embodiments, the linker polypeptide is a linear polypeptide.

[0847] In some embodiments, the linker polypeptide comprises the amino acid sequence of any one of SEQ ID NOs: 1628-1683, 1739-1746, or 1841-1852. In some embodiments, the linker polypeptide comprises the amino acid sequence of any one of SEQ ID NOs: 1628-1683, 1739, 1850, or 1851. In some embodiments, the linker polypeptide comprises the amino acid sequence of any one of SEQ ID NOs: 1740-1746, 1841-1849, or 1852.

[0848] In some embodiments, the linker polypeptide comprises the amino acid sequence of any one of SEQ ID NOs: 1628-1683. In some embodiments, the linker polypeptide comprises the amino acid sequence of any one of SEQ ID NOs: 1628-1630. In some embodiments, the linker polypeptide comprises the amino acid sequence of SEQ ID NO: 1628. In some embodiments, the linker polypeptide comprises the amino acid sequence of SEQ ID NO: 1629. In some embodiments, the linker polypeptide comprises the amino acid sequence of SEQ ID NO: 1630.

[0849] The presence of any linker moiety is optional. Non-limiting example linker moieties suitable for use in GCGR agonist conjugates with half-life extending domains (e.g., Fc-containing polypeptides) are described in more detail below.

[0850] In some embodiments, the half-life extending domain is an antigen-binding protein.

[0851] In some embodiments, the half-life extending domain is an antibody fragment.

[0852] In some embodiments, the half-life extending domain is an antibody. In some embodiments, the half-life extending domain is an isotype antibody such as 655-351, which is described in Table S1 below. In some embodiments, the half-life extending domain comprises a a heavy chain, wherein the heavy chain comprises an amino acid sequence selected from SEQ ID NOs: 1853-1855. In some embodiments, the heavy chain comprises the amino acid sequence of SEQ ID NO: 1853. In some embodiments, the heavy chain comprises the amino acid sequence of SEQ ID NO: 1854. In some embodiments, the heavy chain comprises the amino acid sequence of SEQ ID NO: 1855. In some embodiments, the half-life extending domain comprises a light chain, wherein the light chain comprises an amino acid sequence of SEQ ID NO: 1856 or SEQ ID NO: 1857.

[0853] In some embodiments, the half-life extending domain comprises a light chain and a heavy chain, wherein the light chain and heavy chain comprise the amino acid sequences of SEQ ID NO: 1856 and SEQ ID NO: 1853, respectively.

[0854] In some embodiments, the half-life extending domain comprises a light chain and a heavy chain, wherein the light chain and heavy chain comprise the amino acid sequences of SEQ ID NO: 1856 and SEQ ID NO: 1854, respectively.

[0855] In some embodiments, the half-life extending domain comprises a light chain and a heavy chain, wherein the light chain and heavy chain comprise the amino acid sequences of SEQ ID NO: 1857 and SEQ ID NO: 1855, respectively.

[0856] In some embodiments, the antibody is a monoclonal antibody, a recombinant antibody, a human antibody, a humanized antibody, or a chimeric antibody. In some embodiments, the antibody is a monoclonal antibody. In some embodiments, the antibody is a recombinant antibody. In some embodiments, the antibody is a human antibody. In some embodiments, the antibody is a humanized antibody. In some embodiments, the antibody is a chimeric antibody.

[0857] In some embodiments, the antibody is of the IgG1-, IgG2- IgG3-, or IgG4-type. In some embodiments, the antibody is of the IgG1-, IgG2-, or IgG4-subclass. In some embodiments, the antibody is of the IgG1- or IgG2-subclass.

[0858] In some embodiments, the antibody is of the IgG1-type. In some embodiments, the antibody is of the IgG2-type. In some embodiments, the antibody is of the IgG3-type. In some embodiments, the antibody is of the IgG4-type.

[0859] In some embodiments, the half-life extending domain is an antibody that specifically binds to 2,4-dinitrophenol (“DNP”). Conjugates with aDNP antibodies are described in more detail below.

[0860] In some embodiments, the half-life extending domain is an antibody that specifically binds to a glucose-dependent insulinotropic polypeptide receptor (“GIPR”). In some embodiments, the antibody specifically binds to human GIPR. In some embodiments, the antibody comprises a CDRL1, a CDRL2, a CDRL3, a CDRH1, a CDRH2, and a CDRH3, wherein the CDRL1, the CDRL2, the CDRL3, the CDRH1, the CDRH2, and the CDRH3 comprise the amino acid sequences of SEQ ID NO: 702, SEQ ID NO: 859, SEQ ID NO: 1016, SEQ ID NO: 1173, SEQ ID NO: 1330, and SEQ ID NO: 1487, respectively. In some embodiments, the antibody comprises a light chain variable region comprising the amino acid sequence of SEQ ID NO: 74 and a heavy chain variable region comprising the amino acid sequence of SEQ ID NO: 231. In some embodiments, the antibody comprises a light chain comprising the amino acid sequence of SEQ ID NO: 388 and a heavy chain comprising the amino acid sequence of SEQ ID NO: 1571. Conjugates with aGIPR antibodies are described in more detail below.

[0861] In some embodiments, the molecule has a hGCGR EC₅₀ of less than or equal to 1 nM.

[0862] In some embodiments, the molecule has a hGCGR EC₅₀ of less than or equal to 500 pM (e.g., less than or equal to 475 pM, less than or equal to 450 pM, less than or equal to 425 pM, less than or equal to 400 pM, less than or equal to 375 pM, less than or equal to 350 pM, less than or equal to 325 pM, less than or equal to 300 pM, less than or equal to 275 pM, less than or equal to 250 pM, less than or equal to 225 pM, less than or equal to 200 pM, less than or equal to 175 pM, less than or equal to 150 pM, less than or equal to 125 pM, less than or equal to 100 pM). In some embodiments, the hGCGR EC₅₀ is measured in a functional assay described in “EXAMPLE 1: GCG Receptor Agonist Activity.”

[0863] In some embodiments, the molecule has a hGCGR EC₅₀ of 50 pM, 55 pM, 60 pM, 65 pM, 70 pM, 75 pM, 80 pM, 85 pM, 90 pM, 95 pM, 100 pM, 105 pM, 110 pM, 115 pM, 120 pM, 125 pM, 130 pM, 135 pM, 140 pM, 145 pM, 150 pM, 155 pM, 200 pM, 205 pM, 210 pM, 215 pM, 220 pM, 225 pM, 230 pM, 235 pM, 240 pM, 245 pM, 250 pM, 255 pM, 260 pM, 265 pM, 270 pM, 275 pM, 280 pM, 285 pM, 290 pM, 295 pM, 300 pM, 305 pM, 310 pM, 315 pM, 320 pM, 325 pM, 330 pM, 335 pM, 340 pM, 345 pM, 350 pM, 355 pM, 360 pM, 365 pM, 370 pM, 375 pM, 380 pM, 385 pM, 390 pM, 395 pM, 400 pM, 405 pM, 410 pM, 415 pM, 420 pM, 425 pM, 430 pM, 435 pM, 440 pM, 445 pM, 450 pM, 455 pM, 460 pM, 465 pM, 470 pM, 475 pM, 480 pM, 485 pM, 490 pM, 495 pM, or 500 pM. In some embodiments, the hGCGR EC₅₀ is measured in a functional assay described in “EXAMPLE 1: GCG Receptor Agonist Activity.”

[0864] In some embodiments, the molecule has a human glucagon-like peptide-1 receptor (“hGLP-1R”) EC₅₀:hGCGR EC₅₀ ratio of at least 30:1. In some embodiments, the molecule has a hGLP-1R EC₅₀:hGCGR EC₅₀ ratio of at least 40:1. In some embodiments, the molecule has a hGLP-1R EC₅₀:hGCGR EC₅₀ ratio of at least 50:1. In some embodiments, the molecule has a hGLP-1R EC₅₀:hGCGR EC₅₀ ratio of at least 60:1. In some embodiments, the molecule has a hGLP-1R EC₅₀:hGCGR EC₅₀ ratio of at least 70:1. In some embodiments, the molecule has a hGLP-1R EC₅₀:hGCGR EC₅₀ ratio of at least 80:1. In some embodiments, the molecule has a hGLP-1R EC₅₀:hGCGR EC₅₀ ratio of at least 90:1. In some embodiments, the molecule has a hGLP-1R EC₅₀:hGCGR EC₅₀ ratio of at least 100:1. In some embodiments, the molecule has a hGLP-1R EC₅₀:hGCGR EC₅₀ ratio of at least 150:1. In some embodiments, the molecule has a hGLP-1R EC₅₀:hGCGR EC₅₀ ratio of at least 200:1. In some embodiments, the molecule has a hGLP-1R EC₅₀:hGCGR EC₅₀ ratio of at least 250:1. In some embodiments, the molecule has a hGLP-1R EC₅₀:hGCGR EC₅₀ ratio of at least 300:1. In some embodiments, the molecule has a hGLP-1R EC₅₀:hGCGR EC₅₀ ratio of at least 350:1. In some embodiments, the molecule has a hGLP-1R EC₅₀:hGCGR EC₅₀ ratio of at least 400:1. In some embodiments, the molecule has a hGLP-1R EC₅₀:hGCGR EC₅₀ ratio of at least 450:1. In some embodiments, the molecule has a hGLP-1R EC₅₀:hGCGR EC₅₀ ratio of at least 500:1. In some embodiments, the molecule has a hGLP-1R EC₅₀:hGCGR EC₅₀ ratio of at least 550:1. In some embodiments, the molecule has a hGLP-1R EC₅₀:hGCGR EC₅₀ ratio of at least 650:1. In some embodiments, the molecule has a hGLP-1R EC₅₀:hGCGR EC₅₀ ratio of at least 700:1. In some embodiments, the molecule has a hGLP-1R EC₅₀:hGCGR EC₅₀ ratio of at least 750:1. In some embodiments, the molecule has a hGLP-1R EC₅₀:hGCGR EC₅₀ ratio of at least 800:1. In some embodiments, the molecule has a hGLP-1R EC₅₀:hGCGR EC₅₀ ratio of at least 850:1. In some embodiments, the molecule has a hGLP-1R EC₅₀:hGCGR EC₅₀ ratio of at least 900:1. In some embodiments, the molecule has a hGLP-1R EC₅₀:hGCGR EC₅₀ ratio of at least 950:1. In some embodiments, the molecule has a hGLP-1R EC₅₀:hGCGR EC₅₀ ratio of at least 1000:1. In some embodiments, the hGCGR EC₅₀ is measured in a functional assay described in “EXAMPLE 1: GCG Receptor Agonist Activity” and the hGLP-1R EC₅₀ is measured in a functional assay described in “EXAMPLE 2: GLP-1 Receptor Agonist Activity.”

[0865] In some embodiments, the molecule has a hGLP-1R EC₅₀:hGCGR EC₅₀ ratio of 30:1, 40:1, 45:1, 50:1, 55:1, 60:1, 65:1, 70:1, 75:1, 80:1, 85:1, 90:1, 95:1, 100:1, 125:1, 150:1, 175:1, 200:1, 225:1, 250:1, 275:1, 300:1, 325:1, 350:1, 375:1, 400:1, 425:1, 450:1, 475:1, 500:1, 525:1, 550:1, 575:1, 600:1, 625:1, 650:1, 675:1, 700:1, 725:1, 750:1, 775:1, 800:1, 825:1, 850:1, 875:1, 900:1, 925:1, 950:1, 975:1, or 1000:1. In some embodiments, the hGCGR EC₅₀ is measured in a functional assay described in “EXAMPLE 1: GCG Receptor Agonist Activity” and the hGLP-1R EC₅₀ is measured in a functional assay described in “EXAMPLE 2: GLP-1 Receptor Agonist Activity.”

Conjugates with ADNP Antibodies

[0866] Antibodies that specifically bind to 2,4 dinitrophenol (“DNP”) can be used as carrier immunoglobulins to improve one or more pharmacokinetic characteristics of a GCGR agonist provided herein. For example, in some embodiments, conjugation of a GCGR agonist to an aDNP antibody can prevent or mitigate in vivo degradation of the GCGR agonist by proteolysis or other in vivo activity-diminishing chemical modifications of the GCGR agonist, reduce renal clearance, enhance in vivo half-life or other pharmacokinetic properties of the GCGR agonist, such as, e.g., increasing the rate of absorption, reducing toxicity or immunogenicity, improving solubility, and/or increasing manufacturability or storage stability, compared to an unconjugated form of the GCGR agonist. Antibodies that specifically bind to DNP but have not been detected to bind to human proteins, cells, or tissues are described in WO 2010/108153, which is incorporated by reference herein.

[0867] Provided herein is a molecule that comprises a polypeptide that agonizes a glucagon receptor (“GCGR”), wherein: the polypeptide is selected from the polypeptides described herein; and an antibody that specifically binds to 2,4 dinitrophenol (“DNP”).

[0868] In some embodiments, the antibody is a monoclonal antibody, a recombinant antibody, a human antibody, a humanized antibody, or a chimeric antibody. In some embodiments, the antibody is a monoclonal antibody. In some embodiments, the antibody is a recombinant antibody. In some embodiments, the antibody is a human antibody. In some embodiments, the antibody is a humanized antibody. In some embodiments, the antibody is a chimeric antibody.

[0869] In some embodiments, the antibody is of the IgG1-, IgG2- IgG3-, or IgG4-type. In some embodiments, the antibody is of the IgG1-, IgG2-, or IgG4-subclass. In some embodiments, the antibody is of the IgG1- or IgG2-subclass.

[0870] In some embodiments, the antibody is of the IgG1-type. In some embodiments, the antibody is of the IgG2-type. In some embodiments, the antibody is of the IgG3-type. In some embodiments, the antibody is of the IgG4-type.

[0871] SEQ ID NOs have been assigned to variable light chain, variable heavy chain, light chain, heavy chain, CDRL1, CDRL2, CDRL3, CDRH1, CDRH2, and CDRH3 sequences of non-limiting example antibodies that specifically bind to DNP (“aDNP antibodies”) and are shown in Tables 3-8. The specific CDRs identified in Tables 5 and 6 are defined by Kabat. Each of the example anti-DNP heavy chains (H1-H10) listed in Table 8 can be combined with any of the example anti-DNP light chains shown in Table 7 to form an antibody.

[0872] In some embodiments, the aDNP antibody comprises at least one anti-DNP heavy chain and one anti-DNP light chain from those listed in Tables 7 and 8.

[0873] In some embodiments, the aDNP antibody comprises two different anti-DNP heavy chains and two different anti-DNP light chains listed in Tables 7 and 8. In other embodiments, the aDNP antibody comprises two identical light chains and two identical heavy chains.

[0874] In some embodiments, the aDNP antibody comprises two H1 heavy chains and two L1 light chains, or two H2 heavy chains and two L2 light chains, or two H3 heavy chains and two L3 light chains and other similar combinations of pairs of anti-DNP light chains and pairs of anti-DNP heavy chains.

[0875] In some embodiments, the aDNP antibody comprises a light chain variable (VH) region in which the full set of VL CDRs 1, 2, and 3 (combined) has at least 95% sequence identity to the VL CDRs 1, 2, and 3 of any one of SEQ ID NOs: 1688-1692. In some embodiments, the aDNP antibody comprises a light chain variable (VL) region in which the full set of VL CDRs 1, 2, and 3 (combined) has at least 95% sequence identity to the VL CDRs 1, 2, and 3 of any one of SEQ ID NOs: 1688-1692, wherein the VL CDRs 1, 2, and 3 are defined by any one of Kabat, Chothia, or IGMT. In some embodiments, the aDNP antibody comprises a light chain variable (VL) region in which the full set of VL CDRs 1, 2, and 3 (combined) has at least 95% sequence identity to the VL CDRs 1, 2, and 3 of any one of SEQ ID NOs: 1688-1692, wherein the VL CDRs 1, 2, and 3 are defined by Kabat. In some embodiments, the aDNP antibody comprises a light chain variable (VL) region in which the full set of VL CDRs 1, 2, and 3 (combined) has at least 95% sequence identity to the VL CDRs 1, 2, and 3 of any one of SEQ ID NOs: 1688-1692, wherein the VL CDRs 1, 2, and 3 are defined by Chothia. In some embodiments, the aDNP antibody comprises a light chain variable (VL) region in which the full set of VL CDRs 1, 2, and 3 (combined) has at least 95% sequence identity to the VL CDRs 1, 2, and 3 of any one of SEQ ID NOs: 1688-1692, wherein the VL CDRs 1, 2, and 3 are defined by IGMT.

[0876] In some embodiments, the aDNP antibody comprises a light chain variable (VH) region in which the full set of VL CDRs 1, 2, and 3 (combined) is identical to the VL CDRs 1, 2, and 3 of any one of SEQ ID NOs: 1688-1692. In some embodiments, the aDNP antibody comprises a light chain variable (VL) region in which the full set of VL CDRs 1, 2, and 3 (combined) is identical to the VL CDRs 1, 2, and 3 of any one of SEQ ID NOs: 1688-1692, wherein the VL CDRs 1, 2, and 3 are defined by any one of Kabat, Chothia, or IGMT. In some embodiments, the aDNP antibody comprises a light chain variable (VL) region in which the full set of VL CDRs 1, 2, and 3 (combined) is identical to the VL CDRs 1, 2, and 3 of any one of SEQ ID NOs: 1688-1692, wherein the VL CDRs 1, 2, and 3 are defined by Kabat. In some embodiments, the aDNP antibody comprises a light chain variable (VL) region in which the full set of VL CDRs 1, 2, and 3 (combined) is identical to the VL CDRs 1, 2, and 3 of any one of SEQ ID NOs: 1688-1692, wherein the VL CDRs 1, 2, and 3 are defined by Chothia. In some embodiments, the aDNP antibody comprises a light chain variable (VL) region in which the full set of VL CDRs 1, 2, and 3 (combined) is identical to the VL CDRs 1, 2, and 3 of any one of SEQ ID NOs: 1688-1692, wherein the VL CDRs 1, 2, and 3 are defined by IGMT.

[0877] In some embodiments, the aDNP antibody comprises a CDRL1, a CDRL2, and a CDRL3, wherein the CDRL1, the CDRL2, and the CDRL3 comprise amino acid sequences selected from:
[0878] i. SEQ ID NO: 1714, SEQ ID NO: 1718, and SEQ ID NO: 1720, respectively;
[0879] ii. SEQ ID NO: 1715, SEQ ID NO: 1718, and SEQ ID NO: 1721, respectively;
[0880] iii. SEQ ID NO: 1716, SEQ ID NO: 1718, and SEQ ID NO: 1722, respectively;
[0881] iv. SEQ ID NO: 1717, SEQ ID NO: 1719, and SEQ ID NO: 1723, respectively; or
[0882] v. SEQ ID NO: 1716, SEQ ID NO: 1718, and SEQ ID NO: 1724, respectively.

[0883] In some embodiments, the aDNP antibody comprises a heavy chain variable (VH) region in which the full set of VH CDRs 1, 2, and 3 (combined) has at least 95% sequence identity to the VH CDRs 1, 2, and 3 of any one of SEQ ID NOs: 1693-1697. In some embodiments, the aDNP antibody comprises a heavy chain variable (VH) region in which the full set of VH CDRs 1, 2, and 3 (combined) has at least 95% sequence identity to the VH CDRs 1, 2, and 3 of any one of SEQ ID NOs: 1693-1697, wherein the VH CDRs 1, 2, and 3 are defined by any one of Kabat, Chothia, or IGMT. In some embodiments, the aDNP antibody comprises a heavy chain variable (VH) region in which the full set of VH CDRs 1, 2, and 3 (combined) has at least 95% sequence identity to the VH CDRs 1, 2, and 3 of any one of SEQ ID NOs: 1693-1697, wherein the VH CDRs 1, 2, and 3 are defined by Kabat. In some embodiments, the aDNP antibody comprises a heavy chain variable (VH) region in which the full set of VH CDRs 1, 2, and 3 (combined) has at least 95% sequence identity to the VH CDRs 1, 2, and 3 of any one of SEQ ID NOs: 1693-1697, wherein the VH CDRs 1, 2, and 3 are defined by Chothia. In some embodiments, the aDNP antibody comprises a heavy chain variable (VH) region in which the full set of VH CDRs 1, 2, and 3 (combined) has at least 95% sequence identity to the VH CDRs 1, 2, and 3 of any one of SEQ ID NOs: 1693-1697, wherein the VH CDRs 1, 2, and 3 are defined by IGMT.

[0884] In some embodiments, the aDNP antibody comprises a heavy chain variable (VH) region in which the full set of VH CDRs 1, 2, and 3 (combined) are identical to the VH CDRs 1, 2, and 3 of any one of SEQ ID NOs: 1693-1697. In some embodiments, the aDNP antibody comprises a heavy chain variable (VH) region in which the full set of VH CDRs 1, 2, and 3 (combined) is identical to the VH CDRs 1, 2, and 3 of any one of SEQ ID NOs: 1693-1697, wherein the VH CDRs 1, 2, and 3 are defined by any one of Kabat, Chothia, or IGMT. In some embodiments, the aDNP antibody comprises a heavy chain variable (VH) region in which the full set of VH CDRs 1, 2, and 3 (combined) is identical to the VH CDRs 1, 2, and 3 of any one of SEQ ID NOs: 1693-1697, wherein the VH CDRs 1, 2, and 3 are defined by Kabat. In some embodiments, the aDNP antibody comprises a heavy chain variable (VH) region in which the full set of VH CDRs 1, 2, and 3 (combined) is identical to the VH CDRs 1, 2, and 3 of any one of SEQ ID NOs: 1693-1697, wherein the VH CDRs 1, 2, and 3 are defined by Chothia. In some embodiments, the aDNP antibody comprises a heavy chain variable (VH) region in which the full set of VH CDRs 1, 2, and 3 (combined) is identical to the VH CDRs 1, 2, and 3 of any one of SEQ ID NOs: 1693-1697, wherein the VH CDRs 1, 2, and 3 are defined by IGMT.

[0885] In some embodiments, the aDNP antibody comprises a CDRH1, a CDRH2, and a CDRH3, wherein the CDRH1, the CDRH2, and the CDRH3 comprise amino acid sequences selected from:
[0886] i. SEQ ID NO: 1725, SEQ ID NO: 1729, and SEQ ID NO: 1733, respectively;
[0887] ii. SEQ ID NO: 1726, SEQ ID NO: 1730, and SEQ ID NO: 1734, respectively;
[0888] iii. SEQ ID NO: 1726, SEQ ID NO: 1730, and SEQ ID NO: 1735, respectively;
[0889] iv. SEQ ID NO: 1726, SEQ ID NO: 1730, and SEQ ID NO: 1736, respectively;
[0890] v. SEQ ID NO: 1727, SEQ ID NO: 1731, and SEQ ID NO: 1737, respectively; or
[0891] vi. SEQ ID NO: 1728, SEQ ID NO: 1732, and SEQ ID NO: 1738, respectively.

[0892] In some embodiments, the aDNP antibody comprises a CDRL1, a CDRL2, a CDRL3, a CDRH1, a CDRH2, and a CDRH3, wherein the CDRL1, the CDRL2, the CDRL3, the CDRH1, the CDRH2, and the CDRH3 comprise amino acid sequences of SEQ ID NO: 1715, SEQ ID NO: 1718, SEQ ID NO: 1721, SEQ ID NO: 1726, SEQ ID NO: 1730, SEQ ID NO: 1735, respectively.

[0893] In some embodiments, the aDNP antibody comprises a CDRL1, a CDRL2, a CDRL3, a CDRH1, a CDRH2, and a CDRH3, wherein the CDRL1, the CDRL2, the CDRL3, the CDRH1, the CDRH2, and the CDRH3 comprise amino acid sequences of SEQ ID NO: 1716, SEQ ID NO: 1718, SEQ ID NO: 1722, SEQ ID NO: 1727, SEQ ID NO: 1731, and SEQ ID NO: 1737, respectively.

[0894] In some embodiments, the aDNP antibody comprises a light chain variable region, wherein the light chain variable region comprises an amino acid sequence selected from SEQ ID NOs: 1688-1962. In some embodiments, the light chain variable region comprises the amino acid sequence of SEQ ID NO: 1688. In some embodiments, the light chain variable region comprises the amino acid sequence of SEQ ID NO: 1689. In some embodiments, the light chain variable region comprises the amino acid sequence of SEQ ID NO: 1690. In some embodiments, the light chain variable region comprises the amino acid sequence of SEQ ID NO: 1691. In some embodiments, the light chain variable region comprises the amino acid sequence of SEQ ID NO: 1692.

[0895] In some embodiments, the aDNP antibody comprises a heavy chain variable region, wherein the heavy chain variable region comprises an amino acid sequence selected from SEQ ID NOs: 1693-1698. In some embodiments, the heavy chain variable region comprises the amino acid sequence of SEQ ID NO: 1693. In some embodiments, the heavy chain variable region comprises the amino acid sequence of SEQ ID NO: 1694. In some embodiments, the heavy chain variable region comprises the amino acid sequence of SEQ ID NO: 1695. In some embodiments, the heavy chain variable region comprises the amino acid sequence of SEQ ID NO: 1696. In some embodiments, the heavy chain variable region comprises the amino acid sequence of SEQ ID NO: 1697. In some embodiments, the heavy chain variable region comprises the amino acid sequence of SEQ ID NO: 1698.

[0896] In some embodiments, the aDNP antibody comprises a light chain variable region and a heavy chain variable region, wherein the light chain variable region and the heavy chain variable region comprise the amino acid sequences of SEQ ID NO: 1689 and SEQ ID NO: 1695, respectively.

[0897] In some embodiments, the aDNP antibody comprises a light chain variable (VL) region in which the full set of VL CDRs 1, 2, and 3 (combined) has at least 95% sequence identity to the VL CDRs 1, 2, and 3 of SEQ ID NO: 1689 and a heavy chain variable (VH) region in which the full set of VH CDRs 1, 2, and 3 (combined) has at least 95% sequence identity to the VH CDRs 1, 2, and 3 of SEQ ID NO: 1695. In some embodiments, the aDNP antibody comprises a VL region in which the full set of VL CDRs 1, 2, and 3 (combined) has at least 95% sequence identity to the VL CDRs 1, 2, and 3 of SEQ ID NO: 1689 and a VH region in which the full set of VH CDRs 1, 2, and 3 (combined) has at least 95% sequence identity to the VH CDRs 1, 2, and 3 of SEQ ID NO: 1695, wherein the VL CDRs 1, 2, and 3 and the VH CDRs 1, 2, and 3 are defined by any one of Kabat, Chothia, or IGMT.

[0898] In some embodiments, the aDNP antibody comprises a light chain variable (VL) region in which the full set of VL CDRs 1, 2, and 3 (combined) is identical to the VL CDRs 1, 2, and 3 of SEQ ID NO: 1689 and a heavy chain variable (VH) region in which the full set of VH CDRs 1, 2, and 3 (combined) is identical to the VH CDRs 1, 2, and 3 of SEQ ID NO: 1695. In some embodiments, the aDNP antibody comprises a VL region in which the full set of VL CDRs 1, 2, and 3 (combined) is identical to the VL CDRs 1, 2, and 3 of SEQ ID NO: 1689 and a VH region in which the full set of VH CDRs 1, 2, and 3 (combined) is identical to the VH CDRs 1, 2, and 3 of SEQ ID NO: 1695, wherein the VL CDRs 1, 2, and 3 and the VH CDRs 1, 2, and 3 are defined by any one of Kabat, Chothia, or IGMT. In some embodiments, the VL CDRs 1, 2, and 3 and the VH CDRs 1, 2, and 3 are defined by Kabat. In some embodiments, the VL CDRs 1, 2, and 3 and the VH CDRs 1, 2, and 3 are defined by Chothia. In some embodiments, the VL CDRs 1, 2, and 3 and the VH CDRs 1, 2, and 3 are defined by IGMT.

[0899] In some embodiments, the aDNP antibody comprises a light chain variable region and a heavy chain variable region, wherein the light chain variable region and the heavy chain variable region comprise the amino acid sequences of SEQ ID NO: 1690 and SEQ ID NO: 1697, respectively.

[0900] In some embodiments, the aDNP antibody comprises a light chain variable (VL) region in which the full set of VL CDRs 1, 2, and 3 (combined) has at least 95% sequence identity to the VL CDRs 1, 2, and 3 of SEQ ID NO: 1690 and a heavy chain variable (VH) region in which the full set of VH CDRs 1, 2, and 3 (combined) has at least 95% sequence identity to the VH CDRs 1, 2, and 3 of SEQ ID NO: 1697. In some embodiments, the aDNP antibody comprises a VL region in which the full set of VL CDRs 1, 2, and 3 (combined) has at least 95% sequence identity to the VL CDRs 1, 2, and 3 of SEQ ID NO: 1690 and a VH region in which the full set of VH CDRs 1, 2, and 3 (combined) has at least 95% sequence identity to the VH CDRs 1, 2, and 3 of SEQ ID NO: 1697, wherein the VL CDRs 1, 2, and 3 and the VH CDRs 1, 2, and 3 are defined by any one of Kabat, Chothia, or IGMT.

[0901] In some embodiments, the aDNP antibody comprises a light chain variable (VL) region in which the full set of VL CDRs 1, 2, and 3 (combined) is identical to the VL CDRs 1, 2, and 3 of SEQ ID NO: 1690 and a heavy chain variable (VH) region in which the full set of VH CDRs 1, 2, and 3 (combined) is identical to the VH CDRs 1, 2, and 3 of SEQ ID NO: 1697. In some embodiments, the aDNP antibody comprises a VL region in which the full set of VL CDRs 1, 2, and 3 (combined) is identical to the VL CDRs 1, 2, and 3 of SEQ ID NO: 1690 and a VH region in which the full set of VH CDRs 1, 2, and 3 (combined) is identical to the VH CDRs 1, 2, and 3 of SEQ ID NO: 1697, wherein the VL CDRs 1, 2, and 3 and the VH CDRs 1, 2, and 3 are defined by any one of Kabat, Chothia, or IGMT. In some embodiments, the VL CDRs 1, 2, and 3 and the VH CDRs 1, 2, and 3 are defined by Kabat. In some embodiments, the VL CDRs 1, 2, and 3 and the VH CDRs 1, 2, and 3 are defined by Chothia. In some embodiments, the VL CDRs 1, 2, and 3 and the VH CDRs 1, 2, and 3 are defined by IGMT.

[0902] In some embodiments, the aDNP antibody comprises a light chain, wherein the light chain comprises an amino acid sequence selected from SEQ ID NOs: 1699-1703. In some embodiments, the light chain comprises the amino acid sequence of SEQ ID NO: 1699. In some embodiments, the light chain comprises the amino acid sequence of SEQ ID NO: 1700. In some embodiments, the light chain comprises the amino acid sequence of SEQ ID NO: 1701. In some embodiments, the light chain comprises the amino acid sequence of SEQ ID NO: 1702. In some embodiments, the light chain comprises the amino acid sequence of SEQ ID NO: 1703.

[0903] In some embodiments, the aDNP antibody comprises a heavy chain, wherein the heavy chain comprises an amino acid sequence selected from SEQ ID NOs: 1704-1713. In some embodiments, the heavy chain comprises the amino acid sequence of SEQ ID NO: 1704. In some embodiments, the heavy chain comprises the amino acid sequence of SEQ ID NO: 1705. In some embodiments, the heavy chain comprises the amino acid sequence of SEQ ID NO: 1706. In some embodiments, the heavy chain comprises the amino acid sequence of SEQ ID NO: 1707. In some embodiments, the heavy chain comprises the amino acid sequence of SEQ ID NO: 1708. In some embodiments, the heavy chain comprises the amino acid sequence of SEQ ID NO: 1709. In some embodiments, the heavy chain comprises the amino acid sequence of SEQ ID NO: 1710. In some embodiments, the heavy chain comprises the amino acid sequence of SEQ ID NO: 1711. In some embodiments, the heavy chain comprises the amino acid sequence of SEQ ID NO: 1712. In some embodiments, the heavy chain comprises the amino acid sequence of SEQ ID NO: 1713.

[0904] In some embodiments, the aDNP antibody comprises a light chain and a heavy chain, wherein the light chain and heavy chain comprise the amino acid sequences of SEQ ID NO: 1700 and SEQ ID NO: 1712, respectively.

[0905] In some embodiments, the aDNP antibody comprises a light chain and a heavy chain, wherein the light chain and heavy chain comprise the amino acid sequences of SEQ ID NO: 1701 and SEQ ID NO: 1713, respectively.

[0906] In some embodiments, the aDNP antibody is conjugated, i.e., covalently bound, directly to an amino acid residue of the polypeptide agonist, or optionally, to a peptidyl or non-peptidyl linker moiety (including, but not limited to, aromatic or aryl linkers) that is covalently bound to an amino acid residue of the polypeptide agonist. For example, in some embodiments, an β-amino group of a lysine residue of the polypeptide is covalently linked to a C-terminus of a linker polypeptide; and an N-terminus of the linker polypeptide is conjugated to a cysteine residue of an aDNP antibody. Illustratively, in some embodiments, a lysine residue of the polypeptide agonist is covalently linked to a C-terminus of a linker polypeptide via an amide bond, e.g., an amide bond formed by condensation of an F amino group of a lysine residue and a carboxyl group of a C-terminus of a polypeptide linker. Additionally, in some embodiments, the N-terminus of the linker polypeptide is derivatized. For example, in some embodiments, the N-terminus of the linker polypeptide is acetylated, such as when a thioether linkage connects an acetylated N terminus of the linker polypeptide and a cysteine residue of the aDNP antibody, wherein the thioether linkage comprises a sulfur atom of the cysteine residue.

[0907] Alternatively, in some embodiments, the C-terminal amino acid residue of the polypeptide is covalently linked to the N-terminal amino acid residue of the linker polypeptide; and the C-terminal amino acid residue of the linker polypeptide is conjugated to a cysteine residue of an aDNP antibody. In some embodiments, the C-terminus of the linker polypeptide is derivatized. In some embodiments, the C-terminal amino acid residue of the linker polypeptide is modified for coupling to a cysteine residue (e.g., is bromoacetylated). Illustratively, in some embodiments, the C-terminus of the linker polypeptide is acetylated, such as when a thioether linkage connects an acetylated C-terminus of the linker polypeptide and a cysteine residue of the aDNP antibody, wherein the thioether linkage comprises a sulfur atom of the cysteine residue.

[0908] In some embodiments, the linker polypeptide is a linear polypeptide.

[0909] In some embodiments, the linker polypeptide comprises the amino acid sequence of any one of SEQ ID NOs: 1628-1683, 1739-1746, or 1841-1852. In some embodiments, the linker polypeptide comprises the amino acid sequence of any one of SEQ ID NOs: 1628-1683, 1739, 1850, or 1851. In some embodiments, the linker polypeptide comprises the amino acid sequence of any one of SEQ ID NOs: 1740-1746, 1841-1849, or 1852.

[0910] In some embodiments, the linker polypeptide comprises the amino acid sequence of any one of SEQ ID NOs: 1628-1683. In some embodiments, the linker polypeptide comprises the amino acid sequence of any one of SEQ ID NOs: 1628-1630. In some embodiments, the linker polypeptide comprises the amino acid sequence of SEQ ID NO: 1628. In some embodiments, the linker polypeptide comprises the amino acid sequence of SEQ ID NO: 1629. In some embodiments, the linker polypeptide comprises the amino acid sequence of SEQ ID NO: 1630. In some embodiments, the linker polypeptide comprises the amino acid sequence of SEQ ID NO: 1631.

TABLE 3
Variable Light (VL) Region Amino Acid Sequences of Example Anti-DNP Antibodies

| Designation | Clone | VL | SEQ ID NO: |
|---|---|---|---|
| L1 | 3A1 | DIQMTQSPSSVSASVGDRVTITCRASQGISNWLAWYQRKPGKAPKLLIYAASSLQS | 1688 |
| | | GVPSRFSGSGSGTDFTLTISSLQPEDFAAYYCQQASSFPWTFGQGTRVEIKRTV | |
| L2 | 3A4 | DIQMTQSPSSVSASVGDRVTITCRASQGISRRLAWYQQKPGKAPKLLIYAASSLQS | 1689 |
| | | GVPSRFSGSGSGTDFTLTISSLQPEDFATYYCQQANSFPFTFGPGTKVDIKRTV | |
| L3 | 3B1 | DIQMTQSPSSLSASEGDRVTITCRASQGIRNDLGWYQQKPGKAPKRLIYAASSLQS | 1690 |
| | | GVPLRFSGSGSGTEFTLTISSLQPEDFATYYCLQYNSYPWTFGQGTKVEIKRTV | |
| L4 | 3C2 | DIQMTQSPSSLSASVGDRVTITCRASQGMSNYLAWYQQKPRKVPKLLIYAASTLQ | 1691 |
| | | SGVPSRFSGSGSGTDFTLTISSLQPEDVATYYCQKFNSAPFTFGPGTKVDIKRTV | |
| L5 | 3H4 | DIQMTLSPSSLSASVGDRVTITCRASQGIRNDLGWYQQKPGKAPKRLIYAASSLQS | 1692 |
| | | GVPSRFSGSGSGTEFTLTISSLQPEDFATYYCLQYNSSPWTFGQGTEVEIKRTV | |

TABLE 4
Variable Heavy (VH) Region Amino Acid Sequences of Example Anti-DNP Antibodies

| Designation | Clone | VH | SEQ ID NO: |
|---|---|---|---|
| H1 | 3A1 | QVQLQESGPGLVKPSETLSLTCTVSGGSISHYYWSWIRQPPGKGLGWIGYIYYSGS | 1693 |
| | | TNYNPSLKSRVTISVDTSKNQFSLKLTSVTAADTAVYYCARARGDGYNYPDAFDI | |
| | | WGQGTMVTVSS | |
| H2 | 3A4 | QVQLVESGGGVVQPGRSLRLSCAASGFTFSSYGMHWVRQAPGKGLEWVAVIWY | 1694 |
| | 3C2 | DGSNKYYADSVKGRFTISRDNSKNTLYLQMNSLRAEDTAVYYCARYNWNYGMD | |
| | | VWGQGTTVTVSS | |
| H3 | 3A4-F | QVQLVESGGGVVQPGRSLRLSCAASGFTFSSYGMHWVRQAPGKGLEWVAVIWY | 1695 |
| | (W101F) | DGSNKYYADSVKGRFTISRDNSKNTLYLQMNSLRAEDTAVYYCARYNFNYGMD | |
| | | VWGQGTTVTVSS | |
| H4 | 3A4-Y | QVQLVESGGGVVQPGRSLRLSCAASGFTFSSYGMHWVRQAPGKGLEWVAVIWY | 1696 |
| | (W101Y) | DGSNKYYADSVKGRFTISRDNSKNTLYLQMNSLRAEDTAVYYCARYNYNYGMD | |
| | | VWGQGTTVTVSS | |
| H5 | 3A4-FSS | QVQLVESGGGVVQPGRSLRLSCAASGFTFSSYGMHWVRQAPGKGLEWVAVIWY | 1695 |
| | | DGSNKYYADSVKGRFTISRDNSKNTLYLQMNSLRAEDTAVYYCARYNFNYGMD | |
| | | VWGQGTTVTVSS | |
| H6 | 3A4-YSS | QVQLVESGGGVVQPGRSLRLSCAASGFTFSSYGMHWVRQAPGKGLEWVAVIWY | 1696 |
| | | DGSNKYYADSVKGRFTISRDNSKNTLYLQMNSLRAEDTAVYYCARYNYNYGMD | |
| | | VWGQGTTVTVSS | |
| H7 | 3B1 | QVQLQESGPGLVKPSETLSLTCTVSGGSISSYYWSWIRQPPGKGLEWIGYIYYSGN | 1697 |
| | | TNSNPSLKSRVTISVDTSKNQFSLKLSSVTAADTAVYYCARTYYDSSGYYYRAFDI | |
| | | WGQGTMVTVSS | |
| H8 | 3H4 | QVQLQESGPGLVKPLQTLSLTCTVSGGSISSGGYYWSWIRQHPGKGLEWIGYIYYS | 1698 |
| | | RSTYYNPSLKSRVTISVDTSKNQFSLKLSSVTAADTAVYYCARTGYSSGWYPFDY | |
| | | WGQGTLVTVSS | |
| H9 | 3A4 SEFL2 | QVQLVESGGGVVQPGRSLRLSCAASGFTFSSYGMHWVRQAPGKGLEWVAVIWY | 1695 |
| | E384C | DGSNKYYADSVKGRFTISRDNSKNTLYLQMNSLRAEDTAVYYCARYNFNYGMD | |
| | | VWGQGTTVTVSS | |
| H10 | 3B1 SEFL2 | QVQLQESGPGLVKPSETLSLTCTVSGGSISSYYWSWIRQPPGKGLEWIGYIYYSGN | 1697 |
| | E384C | TNSNPSLKSRVTISVDTSKNQFSLKLSSVTAADTAVYYCARTYYDSSGYYYRAFDI | |
| | | WGQGTMVTVSS | |

TABLE 5
CDRL1, CDRL2, and CDRL3 Amino Acid Sequences of Example Anti-DNP Antibodies

| Designation | Clone | CDRL1 | CDRL2 | CDRL3 |
|---|---|---|---|---|
| L1 | 3A1 | RASQGISNWLA | AASSLQS | QQASSFPWT |
| | | SEQ ID NO: 1714 | SEQ ID NO: 1718 | SEQ ID NO: 1720 |
| L2 | 3A4 | RASQGISRRLA | AASSLQS | QQANSFPFT |
| | | SEQ ID NO: 1715 | SEQ ID NO: 1718 | SEQ ID NO: 1721 |
| L3 | 3B1 | RASQGIRNDLG | AASSLQS | LQYNSYPWT |
| | | SEQ ID NO: 1716 | SEQ ID NO: 1718 | SEQ ID NO: 1722 |
| L4 | 3C2 | RASQGMSNYLA | AASTLQS | QKFNSAPFT |
| | | SEQ ID NO: 1717 | SEQ ID NO: 1719 | SEQ ID NO: 1723 |
| L5 | 3H4 | RASQGIRNDLG | AASSLQS | LQYNSSPWT |
| | | SEQ ID NO: 1716 | SEQ ID NO: 1718 | SEQ ID NO: 1724 |

TABLE 6
CDRH1, CDRH2, and CDRH3 Amino Acid Sequences of Example Anti-DNP Antibodies

| Designation | Clone | CDRH1 | CDRH2 | CDRH3 |
|---|---|---|---|---|
| H1 | 3A1 | HYYWS | YIYYSGSTNYNPSLKS | ARGDGYNYPDAFDI |
| | | SEQ ID NO: 1725 | SEQ ID NO: 1729 | SEQ ID NO: 1733 |
| H2 | 3A4 | SYGMH | VIWYDGSNKYYADSVKG | YNWNYGMDV |
| | 3C2 | SEQ ID NO: 1726 | SEQ ID NO: 1730 | SEQ ID NO: 1734 |
| H3 | 3A4-F | SYGMH | VIWYDGSNKYYADSVKG | YNFNYGMDV |
| | (W101F) | SEQ ID NO: 1726 | SEQ ID NO: 1730 | SEQ ID NO: 1735 |
| H4 | 3A4-Y | SYGMH | VIWYDGSNKYYADSVKG | YNYNYGMDV |
| | (W101Y) | SEQ ID NO: 1726 | SEQ ID NO: 1730 | SEQ ID NO: 1736 |
| H5 | 3A4-FSS | SYGMH | VIWYDGSNKYYADSVKG | YNFNYGMDV |
| | | SEQ ID NO: 1726 | SEQ ID NO: 1730 | SEQ ID NO: 1735 |
| H6 | 3A4-YSS | SYGMH | VIWYDGSNKYYADSVKG | YNYNYGMDV |
| | | SEQ ID NO: 1726 | SEQ ID NO: 1730 | SEQ ID NO: 1736 |
| H7 | 3B1 | SYYWS | YIYYSGNTNSNPSLKS | TYYDSSGYYYRAFDI |
| | | SEQ ID NO: 1727 | SEQ ID NO: 1731 | SEQ ID NO: 1737 |
| H8 | 3H4 | SGGYYWS | YIYYSRSTYYNPSLKS | TGYSSGWYPFDY |
| | | SEQ ID NO: 1728 | SEQ ID NO: 1732 | SEQ ID NO: 1738 |
| H9 | 3A4-F SEFL2 | SYGMH | VIWYDGSNKYYADSVKG | YNFNYGMDV |
| | E384C | SEQ ID NO: 1726 | SEQ ID NO: 1730 | SEQ ID NO: 1735 |
| H10 | 3B1 SEFL2 | SYYWS | YIYYSGNTNSNPSLKS | TYYDSSGYYYRAFDI |
| | E384C | SEQ ID NO: 1727 | SEQ ID NO: 1731 | SEQ ID NO: 1737 |

TABLE 7
Light Chain (LC) Amino Acid Sequences of Example Anti-DNP Antibodies

| Designation | Clone | LC | SEQ ID NO: |
|---|---|---|---|
| L1 | 3A1 | DIQMTQSPSSVSASVGDRVTITCRASQGISNWLAWYQRKPGKAPKLLIYAASSLQS | 1699 |
| | | GVPSRFSGSGSGTDFTLTISSLQPEDFAAYYCQQASSFPWTFGQGTRVEIKRTVAA | |
| | | PSVFIFPPSDEQLKSGTASVVCLLNNFYPREAKVQWKVDNALQSGNSQESVTEQD | |
| | | SKDSTYSLSSTLTLSKADYEKHKVYACEVTHQGLSSPVTKSFNRGEC | |
| L2 | 3A4 | DIQMTQSPSSVSASVGDRVTITCRASQGISRRLAWYQQKPGKAPKLLIYAASSLQS | 1700 |
| | | GVPSRFSGSGSGTDFTLTISSLQPEDFATYYCQQANSFPFTFGPGTKVDIKRTVAAP | |
| | | SVFIFPPSDEQLKSGTASVVCLLNNFYPREAKVQWKVDNALQSGNSQESVTEQDS | |
| | | KDSTYSLSSTLTLSKADYEKHKVYACEVTHQGLSSPVTKSFNRGEC | |
| L3 | 3B1 | DIQMTQSPSSLSASEGDRVTITCRASQGIRNDLGWYQQKPGKAPKRLIYAASSLQS | 1701 |
| | | GVPLRFSGSGSGTEFTLTISSLQPEDFATYYCLQYNSYPWTFGQGTKVEIKRTVAA | |
| | | PSVFIFPPSDEQLKSGTASVVCLLNNFYPREAKVQWKVDNALQSGNSQESVTEQD | |
| | | SKDSTYSLSSTLTLSKADYEKHKVYACEVTHQGLSSPVTKSFNRGEC | |
| L4 | 3C2 | DIQMTQSPSSLSASVGDRVTITCRASQGMSNYLAWYQQKPRKVPKLLIYAASTLQ | 1702 |
| | | SGVPSRFSGSGSGTDFTLTISSLQPEDVATYYCQKFNSAPFTFGPGTKVDIKRTVAA | |
| | | PSVFIFPPSDEQLKSGTASVVCLLNNFYPREAKVQWKVDNALQSGNSQESVTEQD | |
| | | SKDSTYSLSSTLTLSKADYEKHKVYACEVTHQGLSSPVTKSFNRGEC | |
| L5 | 3H4 | DIQMTLSPSSLSASVGDRVTITCRASQGIRNDLGWYQQKPGKAPKRLIYAASSLQS | 1703 |
| | | GVPSRFSGSGSGTEFTLTISSLQPEDFATYYCLQYNSSPWTFGQGTEVEIKRTVAAP | |
| | | SVFIFPPSDEQLKSGTASVVCLLNNFYPREAKVQWKVDNALQSGNSQESVTEQDS | |
| | | KDSTYSLSSTLTLSKADYEKHKVYACEVTHQGLSSPVTKSFNRGEC | |

TABLE 8
Heavy Chain (HC) Amino Acid Sequences of Example Anti-DNP Antibodies

| Designation | Clone | HC | SEQ ID NO: |
|---|---|---|---|
| H1 | 3A1 | QVQLQESGPGLVKPSETLSLTCTVSGGSISHYYWSWIRQPPGKGLGWIGYIYYSGS | 1704 |
| | | TNYNPSLKSRVTISVDTSKNQFSLKLTSVTAADTAVYYCARARGDGYNYPDAFDI | |
| | | WGQGTMVTVSSASTKGPSVFPLAPCSRSTSESTAALGCLVKDYFPEPVTVSWNSG | |
| | | ALTSGVHTFPAVLQSSGLYSLSSVVTVPSSNFGTQTYTCNVDHKPSNTKVDKTVE | |
| | | RKCCVECPPCPAPPVAGPSVFLFPPKPKDTLMISRTPEVTCVVVDVSHEDPEVQFN | |
| | | WYVDGVEVHNAKTKPREEQFNSTFRVVSVLTVVHQDWLNGKEYKCKVSNKGLP | |
| | | APIEKTISKTKGQPREPQVYTLPPSREEMTKNQVSLTCLVKGFYPSDIAVEWESNG | |
| | | QPENNYKTTPPMLDSDGSFFLYSKLTVDKSRWQQGNVFSCSVMHEALHNHYTQK | |
| | | SLSLSPG(K) | |
| H2 | 3A4 | QVQLVESGGGVVQPGRSLRLSCAASGFTFSSYGMHWVRQAPGKGLEWVAVIWY | 1705 |
| | 3C2 | DGSNKYYADSVKGRFTISRDNSKNTLYLQMNSLRAEDTAVYYCARYNWNYGMD | |
| | | VWGQGTTVTVSSASTKGPSVFPLAPCSRSTSESTAALGCLVKDYFPEPVTVSWNS | |
| | | GALTSGVHTFPAVLQSSGLYSLSSVVTVPSSNFGTQTYTCNVDHKPSNTKVDKTV | |
| | | ERKCCVECPPCPAPPVAGPSVFLFPPKPKDTLMISRTPEVTCVVVDVSHEDPEVQF | |
| | | NWYVDGVEVHNAKTKPREEQFNSTFRVVSVLTVVHQDWLNGKEYKCKVSNKG | |
| | | LPAPIEKTISKTKGQPREPQVYTLPPSREEMTKNQVSLTCLVKGFYPSDIAVEWESN | |
| | | GQPENNYKTTPPMLDSDGSFFLYSKLTVDKSRWQQGNVFSCSVMHEALHNHYTQ | |
| | | KSLSLSPG(K) | |
| H3 | 3A4-F | QVQLVESGGGVVQPGRSLRLSCAASGFTFSSYGMHWVRQAPGKGLEWVAVIWY | 1706 |
| | (W101F) | DGSNKYYADSVKGRFTISRDNSKNTLYLQMNSLRAEDTAVYYCARYNFNYGMD | |
| | | VWGQGTTVTVSSASTKGPSVFPLAPCSRSTSESTAALGCLVKDYFPEPVTVSWNS | |
| | | GALTSGVHTFPAVLQSSGLYSLSSVVTVPSSNFGTQTYTCNVDHKPSNTKVDKTV | |
| | | ERKCCVECPPCPAPPVAGPSVFLFPPKPKDTLMISRTPEVTCVVVDVSHEDPEVQF | |
| | | NWYVDGVEVHNAKTKPREEQFNSTFRVVSVLTVVHQDWLNGKEYKCKVSNKG | |
| | | LPAPIEKTISKTKGQPREPQVYTLPPSREEMTKNQVSLTCLVKGFYPSDIAVEWESN | |
| | | GQPENNYKTTPPMLDSDGSFFLYSKLTVDKSRWQQGNVFSCSVMHEALHNHYTQ | |
| | | KSLSLSPG(K) | |
| H4 | 3A4-Y | QVQLVESGGGVVQPGRSLRLSCAASGFTFSSYGMHWVRQAPGKGLEWVAVIWY | 1707 |
| | (W101Y) | DGSNKYYADSVKGRFTISRDNSKNTLYLQMNSLRAEDTAVYYCARYNYNYGMD | |
| | | VWGQGTTVTVSSASTKGPSVFPLAPCSRSTSESTAALGCLVKDYFPEPVTVSWNS | |
| | | GALTSGVHTFPAVLQSSGLYSLSSVVTVPSSNFGTQTYTCNVDHKPSNTKVDKTV | |
| | | ERKCCVECPPCPAPPVAGPSVFLFPPKPKDTLMISRTPEVTCVVVDVSHEDPEVQF | |
| | | NWYVDGVEVHNAKTKPREEQFNSTFRVVSVLTVVHQDWLNGKEYKCKVSNKG | |
| | | LPAPIEKTISKTKGQPREPQVYTLPPSREEMTKNQVSLTCLVKGFYPSDIAVEWESN | |
| | | GQPENNYKTTPPMLDSDGSFFLYSKLTVDKSRWQQGNVFSCSVMHEALHNHYTQ | |
| | | KSLSLSPG(K) | |
| H5 | 3A4-FSS | QVQLVESGGGVVQPGRSLRLSCAASGFTFSSYGMHWVRQAPGKGLEWVAVIWY | 1708 |
| | | DGSNKYYADSVKGRFTISRDNSKNTLYLQMNSLRAEDTAVYYCARYNFNYGMD | |
| | | VWGQGTTVTVSSASTKGPSVFPLAPCSRSTSESTAALGCLVKDYFPEPVTVSWNS | |
| | | GALTSGVHTFPAVLQSSGLYSLSSVVTVPSSNFGTQTYTCNVDHKPSNTKVDKTV | |
| | | ERKSSVECPPCPAPPVAGPSVFLFPPKPKDTLMISRTPEVTCVVVDVSHEDPEVQFN | |
| | | WYVDGVEVHNAKTKPREEQFNSTFRVVSVLTVVHQDWLNGKEYKCKVSNKGLP | |
| | | APIEKTISKTKGQPREPQVYTLPPSREEMTKNQVSLTCLVKGFYPSDIAVEWESNG | |
| | | QPENNYKTTPPMLDSDGSFFLYSKLTVDKSRWQQGNVFSCSVMHEALHNHYTQK | |
| | | SLSLSPG(K) | |
| H6 | 3A4-YSS | QVQLVESGGGVVQPGRSLRLSCAASGFTFSSYGMHWVRQAPGKGLEWVAVIWY | 1709 |
| | | DGSNKYYADSVKGRFTISRDNSKNTLYLQMNSLRAEDTAVYYCARYNYNYGMD | |
| | | VWGQGTTVTVSSASTKGPSVFPLAPCSRSTSESTAALGCLVKDYFPEPVTVSWNS | |
| | | GALTSGVHTFPAVLQSSGLYSLSSVVTVPSSNFGTQTYTCNVDHKPSNTKVDKTV | |
| | | ERKSSVECPPCPAPPVAGPSVFLFPPKPKDTLMISRTPEVTCVVVDVSHEDPEVQFN | |
| | | WYVDGVEVHNAKTKPREEQFNSTFRVVSVLTVVHQDWLNGKEYKCKVSNKGLP | |
| | | APIEKTISKTKGQPREPQVYTLPPSREEMTKNQVSLTCLVKGFYPSDIAVEWESNG | |
| | | QPENNYKTTPPMLDSDGSFFLYSKLTVDKSRWQQGNVFSCSVMHEALHNHYTQK | |
| | | SLSLSPG(K) | |
| H7 | 3B1 | QVQLQESGPGLVKPSETLSLTCTVSGGSISSYYWSWIRQPPGKGLEWIGYIYYSGN | 1710 |
| | | TNSNPSLKSRVTISVDTSKNQFSLKLSSVTAADTAVYYCARTYYDSSGYYYRAFDI | |
| | | WGQGTMVTVSSASTKGPSVFPLAPCSRSTSESTAALGCLVKDYFPEPVTVSWNSG | |
| | | ALTSGVHTFPAVLQSSGLYSLSSVVTVPSSNFGTQTYTCNVDHKPSNTKVDKTVE | |
| | | RKCCVECPPCPAPPVAGPSVFLFPPKPKDTLMISRTPEVTCVVVDVSHEDPEVQFN | |
| | | WYVDGVEVHNAKTKPREEQFNSTFRVVSVLTVVHQDWLNGKEYKCKVSNKGLP | |
| | | APIEKTISKTKGQPREPQVYTLPPSREEMTKNQVSLTCLVKGFYPSDIA VEWESNG | |
| | | QPENNYKTTPPMLDSDGSFFLYSKLTVDKSRWQQGNVFSCSVMHEALHNHYTQK | |
| | | SLSLSPG(K) | |
| H8 | 3H4 | QVQLQESGPGLVKPLQTLSLTCTVSGGSISSGGYYWSWIRQHPGKGLEWIGYIYYS | 1711 |
| | | RSTYYNPSLKSRVTISVDTSKNQFSLKLSSVTAADTAVYYCARTGYSSGWYPFDY | |
| | | WGQGTLVTVSSASTKGPSVFPLAPCSRSTSESTAALGCLVKDYFPEPVTVSWNSG | |
| | | ALTSGVHTFPAVLQSSGLYSLSSVVTVPSSNFGTQTYTCNVDHKPSNTKVDKTVE | |
| | | RKCCVECPPCPAPPVAGPSVFLFPPKPKDTLMISRTPEVTCVVVDVSHEDPEVQFN | |
| | | WYVDGVEVHNAKTKPREEQFNSTFRVVSVLTVVHQDWLNGKEYKCKVSNKGLP | |
| | | APIEKTISKTKGQPREPQVYTLPPSREEMTKNQVSLTCLVKGFYPSDIAVEWESNG | |
| | | QPENNYKTTPPMLDSDGSFFLYSKLTVDKSRWQQGNVFSCSVMHEALHNHYTQK | |
| | | SLSLSPG(K) | |
| H9 | 3A4-F | QVQLVESGGGVVQPGRSLRLSCAASGFTFSSYGMHWVRQAPGKGLEWVAVIWY | 1712 |
| | SEFL2 | DGSNKYYADSVKGRFTISRDNSKNTLYLQMNSLRAEDTAVYYCARYNFNYGMD | |
| | E384C | VWGQGTTVTVSSASTKGPSVFPLAPSSKSTSGGTAALGCLVKDYFPEPVTVSWNS | |
| | | GALTSGVHTFPAVLQSSGLYSLSSVVTVPSSSLGTQTYICNVNHKPSNTKVDKKVE | |
| | | PKSCDKTHTCPPCPAPELLGGPSVFLFPPKPKDTLMISRTPEVTCVVVDVSHEDPC | |
| | | VKFNWYVDGVEVHNAKTKPCEEQYGSTYRCVSVLTVLHQDWLNGKEYKCKVS | |
| | | NKALPAPIEKTISKAKGQPREPQVYTLPPSREEMTKNQVSLTCLVKGFYPSDIAVE | |
| | | WESNGQPENNYKTTPPVLDSDGSFFLYSKLTVDKSRWQQGNVFSCSVMHEALHN | |
| | | HYTQKSLSLSPG(K) | |
| H10 | 3B1 SEFL2 | QVQLQESGPGLVKPSETLSLTCTVSGGSISSYYWSWIRQPPGKGLEWIGYIYYSGN | 1713 |
| | E384C | TNSNPSLKSRVTISVDTSKNQFSLKLSSVTAADTAVYYCARTYYDSSGYYYRAFDI | |
| | | WGQGTMVTVSSASTKGPSVFPLAPSSKSTSGGTAALGCLVKDYFPEPVTVSWNSG | |
| | | ALTSGVHTFPAVLQSSGLYSLSSVVTVPSSSLGTQTYICNVNHKPSNTKVDKKVEP | |
| | | KSCDKTHTCPPCPAPELLGGPSVFLFPPKPKDTLMISRTPEVTCVVVDVSHEDPCV | |
| | | KFNWYVDGVEVHNAKTKPCEEQYGSTYRCVSVLTVLHQDWLNGKEYKCKVSN | |
| | | KALPAPIEKTISKAKGQPREPQVYTLPPSREEMTKNQVSLTCLVKGFYPSDIAVEW | |
| | | ESNGQPENNYKTTPPVLDSDGSFFLYSKLTVDKSRWQQGNVFSCSVMHEALHNH | |
| | | YTQKSLSLSPG(K) | |

TABLE S1
Amino Acid Sequences of Example Half-Life Extending Domains

| Description | Amino Acid Sequence | SEQ ID NO: |
|---|---|---|
| 655-341 SEFL2 | QVQLQESGPGLVKPSQTLSLTCTVSGGSISSGDYFWSWIRQLPGKGLEWIGHIHNSGTTYY | 1853 |
| T487C HC | NPSLKSRVTISVDTSKKQFSLRLSSVTAADTAVYYCARDRGGDYAYGMDVWGQGTTVTV | |
| | SSASTKGPSVFPLAPSSKSTSGGTAALGCLVKDYFPEPVTVSWNSGALTSGVHTFPAVLQS | |
| | SGLYSLSSVVTVPSSSLGTQTYICNVNHKPSNTKVDKRVEPKSCDKTHTCPPCPAPELLGG | |
| | PSVFLFPPKPKDTLMISRTPEVTCVVVDVSHEDPEVKFNWYVDGVEVHNAKTKPCEEQYG | |
| | STYRCVSVLTVLHQDWLNGKEYKCKVSNKALPAPIEKTISKAKGQPREPQVYTLPPSREE | |
| | MCKNQVSLTCLVKGFYPSDIAVEWESNGQPENNYKTTPPVLDSDGSFFLYSKLTVDKSRW | |
| | QQGNVFSCSVMHEALHNHYTQKSLSLSPGK | |
| 655-341 SEFL2 | QVQLQESGPGLVKPSQTLSLTCTVSGGSISSGDYFWSWIRQLPGKGLEWIGHIHNSGTTYY | 1854 |
| E384C HC | NPSLKSRVTISVDTSKKQFSLRLSSVTAADTAVYYCARDRGGDYAYGMDVWGQGTTVTV | |
| | SSASTKGPSVFPLAPSSKSTSGGTAALGCLVKDYFPEPVTVSWNSGALTSGVHTFPAVLQS | |
| | SGLYSLSSVVTVPSSSLGTQTYICNVNHKPSNTKVDKRVEPKSCDKTHTCPPCPAPELLGG | |
| | PSVFLFPPKPKDTLMISRTPEVTCVVVDVSHEDPCVKFNWYVDGVEVHNAKTKPCEEQYG | |
| | STYRCVSVLTVLHQDWLNGKEYKCKVSNKALPAPIEKTISKAKGQPREPQVYTLPPSREE | |
| | MTKNQVSLTCLVKGFYPSDIAVEWESNGQPENNYKTTPPVLDSDGSFFLYSKLTVDKSRW | |
| | QQGNVFSCSVMHEALHNHYTQKSLSLSPGK | |
| 655-341 SEFL2 | QVQLQESGPGLVKPSQTLSLTCTVSGGSISSGDYFWSWIRQLPGKGLEWIGHIHNSGTTYY | 1855 |
| D88C HC | NPSLKSRVTISVDTSKKQFSLRLSSVTAADTAVYYCARDRGGDYAYGMDVWGQGTTVTV | |
| | SSASTKGPSVFPLAPSSKSTSGGTAALGCLVKDYFPEPVTVSWNSGALTSGVHTFPAVLQS | |
| | SGLYSLSSVVTVPSSSLGTQTYICNVNHKPSNTKVDKRVEPKSCDKTHTCPPCPAPELLGG | |
| | PSVFLFPPKPKDTLMISRTPEVTCVVVDVSHEDPEVKFNWYVDGVEVHNAKTKPCEEQYG | |
| | STYRCVSVLTVLHQDWLNGKEYKCKVSNKALPAPIEKTISKAKGQPREPQVYTLPPSREE | |
| | MTKNQVSLTCLVKGFYPSDIAVEWESNGQPENNYKTTPPVLDSDGSFFLYSKLTVDKSRW | |
| | QQGNVFSCSVMHEALHNHYTQKSLSLSPGK | |
| 655-341 SEFL2 | EIVLTQSPGTLSLSPGERATLSCRASQGISRSELAWYQQKPGQAPSLLIYGASSRATGIPDRF | 1856 |
| T487C LC | SGSGSGTDFTLTISRLEPEDFAVYYCQQFGSSPWTFGQGTKVEIKRTVAAPSVFIFPPSDEQL | |
| 655-341 SEFL2 | KSGTASVVCLLNNFYPREAKVQWKVDNALQSGNSQESVTEQDSKDSTYSLSSTLTLSKAD | |
| E384C LC | YEKHKVYACEVTHQGLSSPVTKSFNRGEC | |
| 655-341 SEFL2 | EIVLTQSPGTLSLSPGERATLSCRASQGISRSELAWYQQKPGQAPSLLIYGASSRATGIPDRF | 1857 |
| D88C LC | SGSGSGTCFTLTISRLEPEDFAVYYCQQFGSSPWTFGQGTKVEIKRTVAAPSVFIFPPSDEQL | |
| | KSGTASVVCLLNNFYPREAKVQWKVDNALQSGNSQESVTEQDSKDSTYSLSSTLTLSKAD | |
| | YEKHKVYACEVTHQGLSSPVTKSFNRGEC | |
| Fc SEFL2 T487C | DKTHTCPPCPAPELLGGPSVFLFPPKPKDTLMISRTPEVTCVVVDVSHEDPEVKFNWYVDG | 1858 |
| | VEVHNAKTKPCEEQYGSTYRCVSVLTVLHQDWLNGKEYKCKVSNKALPAPIEKTISKAK | |
| | GQPREPQVYTLPPSREEMCKNQVSLTCLVKGFYPSDIAVEWESNGQPENNYKTTPPVLDS | |
| | DGSFFLYSKLTVDKSRWQQGNVFSCSVMHEALHNHYTQKSLSLSPGK | |

Conjugates with Glucose-Dependent Insulinotropic Polypeptide Receptor Antagonists

[0911] The present disclosure further provides molecules in which a glucagon (SEQ ID NO: 1576) or glucagon analog, including, but not limited to, a polypeptide agonist described above, is conjugated to an antigen-binding protein that specifically binds to a glucose-dependent insulinotropic polypeptide receptor (“GIPR”), such as an anti-GIPR antibody.

[0912] Provided herein is a molecule comprising: a first polypeptide that agonizes a glucagon receptor (“GCGR”); and an antigen-binding protein that specifically binds to a glucose-dependent insulinotropic polypeptide receptor (“GIPR”).

[0913] In some embodiments, the antigen-binding protein (e.g., the anti-GIPR antibody) binds to the extracellular portion of human GIPR. In some embodiments, the antigen-binding protein inhibits binding of GIP to the extracellular portion of human GIPR. In some embodiments, the human GIPR has the amino acid sequence of SEQ ID NO: 1577. In some embodiments, the human GIPR has the amino acid sequence of SEQ ID NO: 1578. In some embodiments, the human GIPR has the amino acid sequence of SEQ ID NO: 1579.

[0914] In some embodiments, the antigen-binding protein (e.g., the anti-GIPR antibody) binds to the N-terminal extracellular domain of human GIPR. In some embodiments, the antigen-binding protein inhibits binding of GIP to the N-terminal extracellular domain of human GIPR. In some embodiments, the human GIPR has the amino acid sequence of SEQ ID NO: 1577. In some embodiments, the human GIPR has the amino acid sequence of SEQ ID NO: 1578. In some embodiments, the human GIPR has the amino acid sequence of SEQ ID NO: 1579.

[0915] In some embodiments, the antigen-binding protein (e.g., the anti-GIPR antibody) binds to one or more amino acids at positions 1-139 of human GIPR. In some embodiments, the antigen-binding protein (e.g., the anti-GIPR antibody) inhibits binding of GIP to the amino acids at positions 1-139 of human GIPR. In some embodiments, the human GIPR has the amino acid sequence of SEQ ID NO: 1577. In some embodiments, the human GIPR has the amino acid sequence of SEQ ID NO: 1578. In some embodiments, the human GIPR has the amino acid sequence of SEQ ID NO: 1579.

[0916] In some embodiments, the antigen-binding protein is an antagonist of GIPR. In some embodiments, the antigen-binding protein is an antagonist of human GIPR. In some embodiments, the human GIPR has the amino acid sequence of SEQ ID NO: 1577. In some embodiments, the human GIPR has the amino acid sequence of SEQ ID NO: 1578. In some embodiments, the human GIPR has the amino acid sequence of SEQ ID NO: 1579.

[0917] In some embodiments, the antigen-binding protein (e.g., the anti-GIPR antibody) is an antagonist of human GIPR and inhibits binding of GIP to the N-terminal extracellular domain of human GIPR. In some embodiments, the antigen-binding protein (e.g., the anti-GIPR antibody) is an antagonist of human GIPR and inhibits binding of GIP to the amino acids at positions 1-139 of human GIPR. In some embodiments, the human GIPR has the amino acid sequence of SEQ ID NO: 1577. In some embodiments, the human GIPR has the amino acid sequence of SEQ ID NO: 1578. In some embodiments, the human GIPR has the amino acid sequence of SEQ ID NO: 1579.

[0918] In some embodiments, the antigen-binding protein (e.g., the anti-GIPR antibody) is an antagonist of human GIPR and specifically binds to the N-terminal extracellular domain of human GIPR. In some embodiments, the antigen-binding protein (e.g., the anti-GIPR antibody) is an antagonist of human GIPR and specifically binds to one or more of the amino acids at positions 1-139 of human GIPR. In some embodiments, the human GIPR has the amino acid sequence of SEQ ID NO: 1577. In some embodiments, the human GIPR has the amino acid sequence of SEQ ID NO: 1578. In some embodiments, the human GIPR has the amino acid sequence of SEQ ID NO: 1579.

[0919] Non-limiting examples of GIPR antagonists are provided in, for example, WO 2017/112824.

[0920] Non-limiting example antigen-binding proteins that specifically bind to GIPR, including human GIPR (hGIPR), are described herein. In some embodiments, the human GIPR has the amino acid sequence of SEQ ID NO: 1577. In some embodiments, the human GIPR has the amino acid sequence of SEQ ID NO: 1578. In some embodiments, the human GIPR has the amino acid sequence of SEQ ID NO: 1579.

[0921] The non-limiting example antigen-binding proteins described herein are antagonists of GIPR and can have one, two, three, four, five, six, seven, or all eight of the following characteristics:
[0922] a) ability to prevent or reduce binding of GIP to GIPR, where the levels can be measured, for example, by the methods such as radioactive- or fluorescence-labeled ligand binding study, or by the methods described herein (e.g. a cAMP assay or another functional assay). The decrease can be at least 10%, 25%, 50%, 100% or more relative to the pre-treatment levels of SEQ ID NO: 1577, 1578, or 1579 under comparable conditions;
[0923] b) ability to decrease body weight or reduce body weight gain;
[0924] c) ability to decrease fat mass or decrease inflammation in fat tissue;
[0925] d) ability to decrease circulating cholesterol levels;
[0926] e) ability to decrease circulating triglyceride levels;
[0927] f) ability to decrease liver steatosis or reduce triglyceride level in liver;
[0928] g) decrease AST, ALT, and/or ALP levels.

[0929] In some embodiments, the antigen-binding protein has one or more of the following activities:
[0930] a) binds human GIPR such that KD is ≤200 nM, is ≤150 nM, is ≤100 nM, is ≤50 nM, is ≤10 nM, is ≤5 nM, is ≤2 nM, or is ≤1 nM, e.g., as measured via a surface plasma resonance or kinetic exclusion assay technique; or
[0931] b) has a half-life in human serum of at least 3 days.

[0932] In some embodiments, the antigen-binding protein has an on-rate (ka) for GIPR of at least 10⁴/M×seconds, at least 10⁵/M×seconds, or at least 10⁶/M×seconds as measured, for instance, as described below.

[0933] In some embodiments, the antigen-binding protein has a slow dissociation rate or off-rate. For example, in some embodiments, the GIPR antigen-binding protein has a kd (off-rate) of 1×10⁻² s⁻¹, or 1×10⁻³ s⁻¹, or 1×10⁻⁴ s⁻¹, or 1×10⁻⁵ s⁻¹.

[0934] In some embodiments, the antigen-binding protein has a KD (equilibrium binding affinity) for human GIPR of less than 25 pM, less than 50 pM, less than 100 pM, less than 500 pM, less than 1 nM, less than 5 nM, less than 10 nM, less than 25 nM, or less than 50 nM. In some embodiments, the antigen-binding protein has a KD for human GIPR of 1 nM, 2 nM, 3 nM, 4 nM, 5 nM, 6 nM, 7 nM, 8 nM, 9 nM, 10 nM, 15 nM, 20 nM, 25 nM, 30 nM, 35 nM, 40 nM, 45 nM, 50 nM, 55 nM, 60 nM, 65 nM, 70 nM, 75 nM, 80 nM, 85 nM, 90 nM, 95 nM, 100 nM, 110 nM, 120 nM, 130 nM, 140 nM, 150 nM, 160 nM, 170 nM, 180 nM, 190 nM, 200 nM, 210 nM, 220 nM, 230 nM, 240 nM, 250 nM, 260 nM, 270 nM, 280 nM, 290 nM, 300 nM, 310 nM, 320 nM, 330 nM, 340 nM, 350 nM, 360 nM, 370 nM, 380 nM, 390 nM, 400 nM, 410 nM, 420 nM, 430 nM, 440 nM, 450 nM, 460 nM, 470 nM, 480 nM, 490 nM, or 500 nM.

[0935] In some embodiments, the antigen-binding protein is a polypeptide into which one or more complementary determining regions (CDRs), as described herein, are embedded and/or joined. In some embodiments, the CDRs are embedded into a “framework” region, which orients the CDR(s) such that the proper antigen binding properties of the CDR(s) are achieved.

[0936] In some embodiments, the antigen-binding protein is an antibody. In other embodiments, the CDR sequences are embedded in a different type of protein scaffold. Various example protein scaffolds are further described below.

[0937] In some embodiments, the antigen-binding protein comprises one or more CDRs (e.g., 1, 2, 3, 4, 5, or 6) as described herein. In some embodiments, the antigen-binding protein comprises (a) a polypeptide structure and (b) one or more CDRs that are inserted into and/or joined to the polypeptide structure. The polypeptide structure can take a variety of different forms. For example, it can be, or comprise, the framework of a naturally occurring antibody, or a fragment or a variant thereof, or may be completely synthetic in nature.

[0938] In some embodiments, the polypeptide structure of the antigen-binding protein is an antibody or is derived from an antibody. Non-limiting examples of antigen binding proteins within the scope of this disclosure include, but are not limited to, monoclonal antibodies, bispecific antibodies, minibodies, domain antibodies such as Nanobodies®, synthetic antibodies (sometimes referred to herein as “antibody mimetics”), chimeric antibodies, humanized antibodies, human antibodies, antibody fusions, and portions or fragments of each, respectively. In some embodiments, the antigen-binding protein is an immunological fragment of a complete antibody (e.g., a Fab, a Fab′, a F(ab′)2). In other embodiments, the antigen-binding protein is a scFv that uses CDRs from an anti-GIPR antibody described herein.

[0939] In some embodiments, the antigen-binding protein is an antibody that specifically binds to a protein having an amino acid sequence having at least 90% sequence identity to an amino acid sequence of a human GIPR. In some embodiments, the human GIPR has a sequence comprising a sequence selected from the group consisting of SEQ ID NO: 1577, SEQ ID NO: 1578, and SEQ ID NO: 1579.

[0940] In some embodiments, the antigen-binding protein is a monoclonal antibody, a recombinant antibody, a human antibody, a humanized antibody, a chimeric antibody, or a multispecific antibody. In some embodiments, the antigen-binding protein is a monoclonal antibody. In some embodiments, the antigen-binding protein is a recombinant antibody. In some embodiments, the antigen-binding protein is a human antibody. In some embodiments, the antigen-binding protein is a humanized antibody. In some embodiments, the antigen-binding protein is a chimeric antibody. In some embodiments, the antigen-binding protein is a multispecific antibody.

[0941] In some embodiments, the antigen-binding protein is an antibody is of the IgG1-, IgG2- IgG3- or IgG4-type. In some embodiments, the antibody is of the IgG1-, IgG2-, or IgG4-subclass. In some embodiments, the antibody is of the IgG1- or IgG2-subclass. In some embodiments, the antibody is of the IgG1-type. In some embodiments, the antibody is of the IgG2-type. In some embodiments, the antibody is of the IgG3-type. In some embodiments, the antibody is of the IgG4-type.

[0942] In some embodiments, the antigen-binding protein is an antibody inhibits binding of GIP to the extracellular portion of human GIPR.

[0943] In some embodiments, the antigen-binding protein (e.g., the anti-GIPR antibody) is conjugated, i.e., covalently bound, directly to an amino acid residue of the polypeptide agonist, or optionally, to a peptidyl or non-peptidyl linker moiety (including, but not limited to, aromatic or aryl linkers) that is covalently bound to an amino acid residue of the polypeptide agonist. For example, in some embodiments, an ε-amino group of a lysine residue of the polypeptide is covalently linked to a C-terminus of a linker polypeptide; and an N-terminus of the linker polypeptide is conjugated to a cysteine residue of the antigen-binding protein (e.g., the anti-GIPR antibody).

[0944] Illustratively, in some embodiments, a lysine residue of a polypeptide agonist is covalently linked to a C-terminus of a linker polypeptide via an amide bond, e.g., an amide bond formed by condensation of an ε-amino group of a lysine residue and a carboxyl group of a C-terminus of a polypeptide linker. Additionally, in some embodiments, the N-terminus of the linker polypeptide is derivatized. For example, in some embodiments, the N-terminus of the linker polypeptide is acetylated, such as when a thioether linkage connects an acetylated N-terminus of the linker polypeptide and the cysteine residue of the antigen-binding protein (e.g., the anti-GIPR antibody), wherein the thioether linkage comprises a sulfur atom of the cysteine residue.

[0945] In some embodiments, a lysine residue of a polypeptide agonist is covalently linked to a C-terminus of a linker polypeptide via an amide bond, and an acetylated N-terminus of the linker polypeptide is covalently linked to a cysteine residue of the antigen-binding protein (e.g., the anti-GIPR antibody) via a thioether linkage that comprises a sulfur atom of the cysteine residue.

[0946] In some embodiments, a lysine residue of a polypeptide agonist is covalently linked to a C-terminus of a linker polypeptide via an amide bond formed by condensation of an ε-amino group of the lysine residue and a carboxyl group of a C-terminus of the polypeptide linker, and an acetylated N-terminus of the linker polypeptide is covalently linked to a cysteine residue of the antigen-binding protein (e.g., the anti-GIPR antibody) via a thioether linkage that comprises a sulfur atom of the cysteine residue.

[0947] In some embodiments, the linker polypeptide is a linear polypeptide.

[0948] In some embodiments, the linker polypeptide comprises the amino acid sequence of any one of SEQ ID NOs: 1628-1683. In some embodiments, the linker polypeptide comprises the amino acid sequence of any one of SEQ ID NOs: 1628-1630. In some embodiments, the linker polypeptide comprises the amino acid sequence of SEQ ID NO: 1628. In some embodiments, the linker polypeptide comprises the amino acid sequence of SEQ ID NO: 1629. In some embodiments, the linker polypeptide comprises the amino acid sequence of SEQ ID NO: 1630.

[0949] Accordingly, in some embodiments, the anti-GIPR antigen-binding protein comprises at least one conjugation site. In some embodiments, the conjugation site is amenable to conjugation of an additional functional moiety (e.g., a glucagon receptor agonist) by a defined conjugation chemistry through the side chain of an amino acid residue at the conjugation site. Achieving highly selective, site-specific conjugation requires consideration of a diverse variety of design criteria. First, a preferred conjugation or coupling chemistry must be defined or predetermined. Functional moieties such as, e.g., glucagon receptor agonists, can be conjugated or coupled to the selected conjugation site of the anti-GIPR antigen-binding protein through an assortment of different conjugation chemistries known in the art. For example, in some embodiments, a maleimide-activated conjugation partner targeting an accessible cysteine thiol on the anti-GIPR antigen-binding protein can be used. In other embodiments, conjugation or coupling chemistries targeting the side chains of either canonical or non-canonical, e.g., unnatural, amino acids in the anti-GIPR antigen binding protein sequence can be used.

[0950] Chemistries for chemoselective conjugation of the antigen-binding protein to the polypeptide agonist include, but are not limited to, copper(I)-catalyzed azide-alkyne [3+2] dipolar cycloadditions, Staudinger ligation, other acyl transfers processes, oximations, hydrazone bonding formation, and other suitable organic chemistry reactions such as cross-couplings using water-soluble palladium catalysts. (E.g., Bong et al., Chemoselective Pd(0)-catalyzed peptide coupling in water, Organic Letters 3(16):2509-11 (2001); Dibowski et al., Bioconjugation of peptides by palladium-catalyzed C—C cross-coupling in water, Angew. Chem. Int. Ed. 37(4):476-78 (1998); DeVasher et al., Aqueous-phase, palladium-catalyzed cross-coupling of aryl bromides under mild conditions, using water-soluble, sterically demanding alkylphosphines, J. Org. Chem. 69:7919-27 (2004); Shaugnessy et al., J. Org. Chem, 2003, 68, 6767-6774; Prescher, JA and Bertozzi C R, Chemistry in living system, Nature Chemical Biology 1(1); 13-21 (2005)).

[0951] In some embodiments, conjugation (or covalent binding) to the anti-GIPR antigen-binding protein is through the side chain of an amino acid residue at the conjugation site, for example, but not limited to, a cysteinyl residue. The amino acid residue, for example, a cysteinyl residue, at the internal conjugation site that is selected can be one that occupies the same amino acid residue position in a native Fc domain sequence, or the amino acid residue can be engineered into the Fc domain sequence by substitution or insertion.

[0952] Non-limiting examples of unnatural amino acid residues that can be useful as a conjugation site include: azido-containing amino acid residues, e.g., azidohomoalanine, p-azido-phenylalanine; keto-containing amino acid residues, e.g., p-acetyl-phenylalanine; alkyne-containing amino acid residues, e.g., p-ethynylphenylalanine, homopropargylglycine, p-(prop-2-ynyl)-tyrosine; alkene-containing amino acid residues e.g., homoallylglycine; aryl halide-containing amino acid residues e.g. p-iodophenylalanine, p-bromophenylalanine; and 1,2-aminothiol containing amino acid residues.

[0953] Non-canonical amino acid residues can be incorporated into an anti-GIPR antigen-binding protein by amino acid substitution or insertion. Non-canonical amino acid residues can be incorporated into the peptide by chemical peptide synthesis rather than by synthesis in biological systems, such as recombinantly expressing cells, or alternatively the skilled artisan can employ known techniques of protein engineering that use recombinantly expressing cells. (See, e.g., Link et al., Non-canonical amino acids in protein engineering, Current Opinion in Biotechnology, 14(6):603-609 (2003); Schultz et al., In vivo incorporation of unnatural amino acids, U.S. Pat. No. 7,045,337.)

[0954] The selection of the placement of the conjugation site in the overall anti-GIPR antigen binding protein is another relevant facet of selecting an internal conjugation site. Any of the exposed amino acid residues on the anti-GIPR antigen binding protein can be potentially useful conjugation sites and can be mutated to cysteine or some other reactive amino acid for site-selective coupling, if not already present at the selected conjugation site of the anti-GIPR antigen-binding protein sequence. However, this approach does not take into account potential steric constraints that may perturb the activity of the conjugated partner or limit the reactivity of the engineered mutation.

[0955] In some embodiments, the anti-GIPR antigen-binding protein is an antibody comprising a cysteine amino acid at one or more conjugation site(s). In some embodiments, the one or more conjugation site(s) is located within the CL, CH1, CH2 or CH3 region of the antibody. In some embodiments, the one or more conjugation site(s) are at positions independently selected from the group consisting of 88 (e.g., D88) of the light chain, 384 (e.g., E384) of the heavy chain, and 487 (e.g., T487) of the heavy chain, according to AHo numbering. For sake of clarity, “D70 of the antibody light chain relative to reference sequence SEQ ID NO: 455” is the same substitution site as AHo position D88 of the light chain of antibody 5G12.006 and Kabat position D70 of the light chain of antibody 5G12.006; “E276 of the antibody heavy chain relative to reference sequence SEQ ID NO: 612” is the same substitution site as AHo position E384 of the heavy chain of antibody 5G12.006 and Kabat position E285 of the heavy chain of antibody 5G12.006; and “T363 of the antibody heavy chain relative to reference sequence SEQ ID NO: 612” is the same substitution site as AHo position T487 of the heavy chain of antibody 5G12.006 and Kabat position T382 of the heavy chain of antibody 5G12.006.

[0956] In some embodiments, the anti-GIPR antibody specifically binds to a protein having an amino acid sequence having at least 90% sequence identity to an amino acid sequence of a human GIPR, wherein the antibody comprises at least one cysteine amino acid conjugation site. In some embodiments, the at least one cysteine amino acid conjugation site is selected from the group consisting of 88 of the light chain, 384 of the heavy chain, and 487 of the heavy chain, all according to AHo numbering. In some embodiments, the human GIPR has an amino acid sequence of SEQ ID NO: 1577, SEQ ID NO: 1578, or SEQ ID NO: 1579.

[0957] Non-limiting examples of anti-GIPR antibodies are summarized in Table 9. In some embodiments, the antigen-binding protein is an antibody with the CDR, variable domain, and light and heavy chain sequences as specified in one of the rows of Table 9.

[0958] SEQ ID NOs have been assigned to variable light chain, variable heavy chain, light chain, heavy chain, CDRL1, CDRL2, CDRL3, CDRH1, CDRH2, and CDRH3 sequences of the non-limiting example antibodies and are shown in Tables 9-17. These antibodies can be identified by SEQ ID NO, but also by construct name (e.g., 2C2.005) or identifier number (e.g., iPS:336175). The anti-GIPR antibodies identified in Tables 9-17 below can be grouped into families based on construct name. For example, the “4B1 family” includes the constructs 4B1, 4B1.010, 4B1.011, 4B1.012, 4B1.013, 4B1.014, 4B1.015, and 4B1.016.

[0959] The various light chain and heavy chain variable regions provided herein are depicted in Tables 10 and 11, respectively. Each of these variable regions may be attached to a heavy or light chain constant regions to form a complete antibody heavy and light chain, respectively. Furthermore, each of the so generated heavy and light chain sequences may be combined to form a complete antibody structure.

TABLE 9
Amino Acid SEQ ID NOs. of Example Anti-GIPR Antibodies

| Identifier | Construct | VL | VH | LC | HC | CDRL1 | CDRL2 | CDRL3 | CDRH1 | CDRH2 | CDRH3 |
|---|---|---|---|---|---|---|---|---|---|---|---|
| iPS:336175 | 2C2.005 | 1 | 158 | 315 | 472 | 629 | 786 | 943 | 1100 | 1257 | 1414 |
| iPS:335914 | 4B1 | 2 | 159 | 316 | 473 | 630 | 787 | 944 | 1101 | 1258 | 1415 |
| iPS:335938 | 6H1 | 3 | 160 | 317 | 474 | 631 | 788 | 945 | 1102 | 1259 | 1416 |
| iPS:335941 | 2F11 | 4 | 161 | 318 | 475 | 632 | 789 | 946 | 1103 | 1260 | 1417 |
| iPS:335970 | 5C2 | 5 | 162 | 319 | 476 | 633 | 790 | 947 | 1104 | 1261 | 1418 |
| iPS:335978 | 13H12 | 6 | 163 | 320 | 477 | 634 | 791 | 948 | 1105 | 1262 | 1419 |
| iPS:335986 | 11C1 | 7 | 164 | 321 | 478 | 635 | 792 | 949 | 1106 | 1263 | 1420 |
| iPS:335994 | 12H11 | 8 | 165 | 322 | 479 | 636 | 793 | 950 | 1107 | 1264 | 1421 |
| iPS:336024 | 18E3 | 9 | 166 | 323 | 480 | 637 | 794 | 951 | 1108 | 1265 | 1422 |
| iPS:336041 | 2G10_LC1 | 10 | 167 | 324 | 481 | 638 | 795 | 952 | 1109 | 1266 | 1423 |
| iPS:336077 | 4H9.004 | 11 | 168 | 325 | 482 | 639 | 796 | 953 | 1110 | 1267 | 1424 |
| iPS:336088 | 6A5.004 | 12 | 169 | 326 | 483 | 640 | 797 | 954 | 1111 | 1268 | 1425 |
| iPS:336099 | 17H11.004 | 13 | 170 | 327 | 484 | 641 | 798 | 955 | 1112 | 1269 | 1426 |
| iPS:359621 | 17H11.004.001 | 14 | 171 | 328 | 485 | 642 | 799 | 956 | 1113 | 1270 | 1427 |
| iPS:359781 | 4H9.004.001 | 15 | 172 | 329 | 486 | 643 | 800 | 957 | 1114 | 1271 | 1428 |
| iPS:360929 | 4H9.004.002 | 16 | 173 | 330 | 487 | 644 | 801 | 958 | 1115 | 1272 | 1429 |
| iPS:360936 | 4H9.004.003 | 17 | 174 | 331 | 488 | 645 | 802 | 959 | 1116 | 1273 | 1430 |
| iPS:360943 | 4H9.004.004 | 18 | 175 | 332 | 489 | 646 | 803 | 960 | 1117 | 1274 | 1431 |
| iPS:360949 | 4H9.004.005 | 19 | 176 | 333 | 490 | 647 | 804 | 961 | 1118 | 1275 | 1432 |
| iPS:359761 | 4H9.004.006 | 20 | 177 | 334 | 491 | 648 | 805 | 962 | 1119 | 1276 | 1433 |
| iPS:360955 | 4B1.010 | 21 | 178 | 335 | 492 | 649 | 806 | 963 | 1120 | 1277 | 1434 |
| iPS:360962 | 4B1.011 | 22 | 179 | 336 | 493 | 650 | 807 | 964 | 1121 | 1278 | 1435 |
| iPS:360968 | 4B1.012 | 23 | 180 | 337 | 494 | 651 | 808 | 965 | 1122 | 1279 | 1436 |
| iPS:360974 | 4B1.013 | 24 | 181 | 338 | 495 | 652 | 809 | 966 | 1123 | 1280 | 1437 |
| iPS:360978 | 4B1.014 | 25 | 182 | 339 | 496 | 653 | 810 | 967 | 1124 | 1281 | 1438 |
| iPS:359785 | 4B1.015 | 26 | 183 | 340 | 497 | 654 | 811 | 968 | 1125 | 1282 | 1439 |
| iPS:360982 | 4B1.016 | 27 | 184 | 341 | 498 | 655 | 812 | 969 | 1126 | 1283 | 1440 |
| iPS:335922 | 18F2 | 28 | 185 | 342 | 499 | 656 | 813 | 970 | 1127 | 1284 | 1441 |
| iPS:360986 | 18F2.002 | 29 | 186 | 343 | 500 | 657 | 814 | 971 | 1128 | 1285 | 1442 |
| iPS:360995 | 18F2.003 | 30 | 187 | 344 | 501 | 658 | 815 | 972 | 1129 | 1286 | 1443 |
| iPS:360999 | 18F2.004 | 31 | 188 | 345 | 502 | 659 | 816 | 973 | 1130 | 1287 | 1444 |
| iPS:361005 | 18F2.005 | 32 | 189 | 346 | 503 | 660 | 817 | 974 | 1131 | 1288 | 1445 |
| iPS:361009 | 18F2.006 | 33 | 190 | 347 | 504 | 661 | 818 | 975 | 1132 | 1289 | 1446 |
| iPS:361013 | 18F2.007 | 34 | 191 | 348 | 505 | 662 | 819 | 976 | 1133 | 1290 | 1447 |
| iPS:361017 | 18F2.008 | 35 | 192 | 349 | 506 | 663 | 820 | 977 | 1134 | 1291 | 1448 |
| iPS:361021 | 18F2.009 | 36 | 193 | 350 | 507 | 664 | 821 | 978 | 1135 | 1292 | 1449 |
| iPS:361028 | 18F2.010 | 37 | 194 | 351 | 508 | 665 | 822 | 979 | 1136 | 1293 | 1450 |
| iPS:360535 | 18F2.011 | 38 | 195 | 352 | 509 | 666 | 823 | 980 | 1137 | 1294 | 1451 |
| iPS:361035 | 18F2.012 | 39 | 196 | 353 | 510 | 667 | 824 | 981 | 1138 | 1295 | 1452 |
| iPS:359940 | 2F11.002 | 40 | 197 | 354 | 511 | 668 | 825 | 982 | 1139 | 1296 | 1453 |
| iPS:361039 | 2F11.003 | 41 | 198 | 355 | 512 | 669 | 826 | 983 | 1140 | 1297 | 1454 |
| iPS:361043 | 2F11.004 | 42 | 199 | 356 | 513 | 670 | 827 | 984 | 1141 | 1298 | 1455 |
| iPS:361049 | 2F11.005 | 43 | 200 | 357 | 514 | 671 | 828 | 985 | 1142 | 1299 | 1456 |
| iPS:361055 | 2F11.006 | 44 | 201 | 358 | 515 | 672 | 829 | 986 | 1143 | 1300 | 1457 |
| iPS:361059 | 2F11.007 | 45 | 202 | 359 | 516 | 673 | 830 | 987 | 1144 | 1301 | 1458 |
| iPS:361063 | 2F11.008 | 46 | 203 | 360 | 517 | 674 | 831 | 988 | 1145 | 1302 | 1459 |
| iPS:359949 | 2F11.009 | 47 | 204 | 361 | 518 | 675 | 832 | 989 | 1146 | 1303 | 1460 |
| iPS:359956 | 2F11.010 | 48 | 205 | 362 | 519 | 676 | 833 | 990 | 1147 | 1304 | 1461 |
| iPS:359865 | 6H1.002 | 49 | 206 | 363 | 520 | 677 | 834 | 991 | 1148 | 1305 | 1462 |
| iPS:359869 | 6H1.003 | 50 | 207 | 364 | 521 | 678 | 835 | 992 | 1149 | 1306 | 1463 |
| iPS:359873 | 6H1.004 | 51 | 208 | 365 | 522 | 679 | 836 | 993 | 1150 | 1307 | 1464 |
| iPS:359877 | 6H1.005 | 52 | 209 | 366 | 523 | 680 | 837 | 994 | 1151 | 1308 | 1465 |
| iPS:361067 | 6H1.006 | 53 | 210 | 367 | 524 | 681 | 838 | 995 | 1152 | 1309 | 1466 |
| iPS:361071 | 6H1.007 | 54 | 211 | 368 | 525 | 682 | 839 | 996 | 1153 | 1310 | 1467 |
| iPS:361075 | 6H1.008 | 55 | 212 | 369 | 526 | 683 | 840 | 997 | 1154 | 1311 | 1468 |
| iPS:361079 | 6A5.004.001 | 56 | 213 | 370 | 527 | 684 | 841 | 998 | 1155 | 1312 | 1469 |
| iPS:361085 | 6A5.004.002 | 57 | 214 | 371 | 528 | 685 | 842 | 999 | 1156 | 1313 | 1470 |
| iPS:361091 | 6A5.004.003 | 58 | 215 | 372 | 529 | 686 | 843 | 1000 | 1157 | 1314 | 1471 |
| iPS:361095 | 6A5.004.004 | 59 | 216 | 373 | 530 | 687 | 844 | 1001 | 1158 | 1315 | 1472 |
| iPS:361101 | 6A5.004.005 | 60 | 217 | 374 | 531 | 688 | 845 | 1002 | 1159 | 1316 | 1473 |
| iPS:361105 | 6A5.004.006 | 61 | 218 | 375 | 532 | 689 | 846 | 1003 | 1160 | 1317 | 1474 |
| iPS:361109 | 6A5.004.007 | 62 | 219 | 376 | 533 | 690 | 847 | 1004 | 1161 | 1318 | 1475 |
| iPS:361113 | 6A5.004.008 | 63 | 220 | 377 | 534 | 691 | 848 | 1005 | 1162 | 1319 | 1476 |
| iPS:361120 | 6A5.004.009 | 64 | 221 | 378 | 535 | 692 | 849 | 1006 | 1163 | 1320 | 1477 |
| iPS:359896 | 6A5.004.010 | 65 | 222 | 379 | 536 | 693 | 850 | 1007 | 1164 | 1321 | 1478 |
| iPS:359890 | 6A5.004.011 | 66 | 223 | 380 | 537 | 694 | 851 | 1008 | 1165 | 1322 | 1479 |
| iPS:359567 | 2A11.002 | 67 | 224 | 381 | 538 | 695 | 852 | 1009 | 1166 | 1323 | 1480 |
| iPS:335965 | 2A11.003 | 68 | 225 | 382 | 539 | 696 | 853 | 1010 | 1167 | 1324 | 1481 |
| iPS:361158 | 2A11.004 | 69 | 226 | 383 | 540 | 697 | 854 | 1011 | 1168 | 1325 | 1482 |
| iPS:361165 | 2A11.005 | 70 | 227 | 384 | 541 | 698 | 855 | 1012 | 1169 | 1326 | 1483 |
| iPS:361172 | 2G10_LC1.003 | 71 | 228 | 385 | 542 | 699 | 856 | 1013 | 1170 | 1327 | 1484 |
| iPS:361178 | 2G10_LC1.004 | 72 | 229 | 386 | 543 | 700 | 857 | 1014 | 1171 | 1328 | 1485 |
| iPS:361185 | 2G10_LC1.005 | 73 | 230 | 387 | 544 | 701 | 858 | 1015 | 1172 | 1329 | 1486 |
| iPS:361192 | 2G10_LC1.006 | 74 | 231 | 388 | 545 | 702 | 859 | 1016 | 1173 | 1330 | 1487 |
| iPS:359609 | 2G10_LC1.007 | 75 | 232 | 389 | 546 | 703 | 860 | 1017 | 1174 | 1331 | 1488 |
| iPS:359615 | 2G10_LC1.008 | 76 | 233 | 390 | 547 | 704 | 861 | 1018 | 1175 | 1332 | 1489 |
| iPS:361196 | 2G10_LC1.009 | 77 | 234 | 391 | 548 | 705 | 862 | 1019 | 1176 | 1333 | 1490 |
| iPS:361202 | 2G10_LC1.010 | 78 | 235 | 392 | 549 | 706 | 863 | 1020 | 1177 | 1334 | 1491 |
| iPS:359644 | 18E3.002 | 79 | 236 | 393 | 550 | 707 | 864 | 1021 | 1178 | 1335 | 1492 |
| PS:361206 | 18E3.003 | 80 | 237 | 394 | 551 | 708 | 865 | 1022 | 1179 | 1336 | 1493 |
| iPS:359628 | 18E3.004 | 81 | 238 | 395 | 552 | 709 | 866 | 1023 | 1180 | 1337 | 1494 |
| iPS:359637 | 18E3.005 | 82 | 239 | 396 | 553 | 710 | 867 | 1024 | 1181 | 1338 | 1495 |
| iPS:361210 | 18E3.006 | 83 | 240 | 397 | 554 | 711 | 868 | 1025 | 1182 | 1339 | 1496 |
| iPS:361214 | 18E3.007 | 84 | 241 | 398 | 555 | 712 | 869 | 1026 | 1183 | 1340 | 1497 |
| iPS:361218 | 18E3.008 | 85 | 242 | 399 | 556 | 713 | 870 | 1027 | 1184 | 1341 | 1498 |
| iPS:361222 | 5C2.006 | 86 | 243 | 400 | 557 | 714 | 871 | 1028 | 1185 | 1342 | 1499 |
| iPS:361229 | 5C2.007 | 87 | 244 | 401 | 558 | 715 | 872 | 1029 | 1186 | 1343 | 1500 |
| iPS:361236 | 5C2.008 | 88 | 245 | 402 | 559 | 716 | 873 | 1030 | 1187 | 1344 | 1501 |
| iPS:359685 | 5C2.009 | 89 | 246 | 403 | 560 | 717 | 874 | 1031 | 1188 | 1345 | 1502 |
| iPS:361240 | 5C2.010 | 90 | 247 | 404 | 561 | 718 | 875 | 1032 | 1189 | 1346 | 1503 |
| iPS:361247 | 5C2.011 | 91 | 248 | 405 | 562 | 719 | 876 | 1033 | 1190 | 1347 | 1504 |
| iPS:361254 | 5C2.012 | 92 | 249 | 406 | 563 | 720 | 877 | 1034 | 1191 | 1348 | 1505 |
| iPS:361261 | 5C2.013 | 93 | 250 | 407 | 564 | 721 | 878 | 1035 | 1192 | 1349 | 1506 |
| iPS:361268 | 5C2.014 | 94 | 251 | 408 | 565 | 722 | 879 | 1036 | 1193 | 1350 | 1507 |
| iPS:359669 | 5C2.015 | 95 | 252 | 409 | 566 | 723 | 880 | 1037 | 1194 | 1351 | 1508 |
| iPS:359678 | 5C2.016 | 96 | 253 | 410 | 567 | 724 | 881 | 1038 | 1195 | 1352 | 1509 |
| iPS:361275 | 11C1.002 | 97 | 254 | 411 | 568 | 725 | 882 | 1039 | 1196 | 1353 | 1510 |
| iPS:361282 | 11C1.003 | 98 | 255 | 412 | 569 | 726 | 883 | 1040 | 1197 | 1354 | 1511 |
| iPS:361289 | 11C1.004 | 99 | 256 | 413 | 570 | 727 | 884 | 1041 | 1198 | 1355 | 1512 |
| iPS:359712 | 11C1.005 | 100 | 257 | 414 | 571 | 728 | 885 | 1042 | 1199 | 1356 | 1513 |
| iPS:361293 | 11C1.006 | 101 | 258 | 415 | 572 | 729 | 886 | 1043 | 1200 | 1357 | 1514 |
| iPS:361297 | 11C1.007 | 102 | 259 | 416 | 573 | 730 | 887 | 1044 | 1201 | 1358 | 1515 |
| iPS:361301 | 11C1.008 | 103 | 260 | 417 | 574 | 731 | 888 | 1045 | 1202 | 1359 | 1516 |
| iPS:359703 | 11C1.009 | 104 | 261 | 418 | 575 | 732 | 889 | 1046 | 1203 | 1360 | 1517 |
| iPS:361305 | 11C1.010 | 105 | 262 | 419 | 576 | 733 | 890 | 1047 | 1204 | 1361 | 1518 |
| iPS:361312 | 13H12.002 | 106 | 263 | 420 | 577 | 734 | 891 | 1048 | 1205 | 1362 | 1519 |
| iPS:359744 | 13H12.003 | 107 | 264 | 421 | 578 | 735 | 892 | 1049 | 1206 | 1363 | 1520 |
| iPS:361319 | 13H12.004 | 108 | 265 | 422 | 579 | 736 | 893 | 1050 | 1207 | 1364 | 1521 |
| iPS:359737 | 13H12.005 | 109 | 266 | 423 | 580 | 737 | 894 | 1051 | 1208 | 1365 | 1522 |
| iPS:361326 | 13H12.006 | 110 | 267 | 424 | 581 | 738 | 895 | 1052 | 1209 | 1366 | 1523 |
| iPS:361330 | 12H11.002 | 111 | 268 | 425 | 582 | 739 | 896 | 1053 | 1210 | 1367 | 1524 |
| iPS:361337 | 12H11.003 | 112 | 269 | 426 | 583 | 740 | 897 | 1054 | 1211 | 1368 | 1525 |
| iPS:361344 | 12H11.004 | 113 | 270 | 427 | 584 | 741 | 898 | 1055 | 1212 | 1369 | 1526 |
| iPS:361351 | 12H11.005 | 114 | 271 | 428 | 585 | 742 | 899 | 1056 | 1213 | 1370 | 1527 |
| iPS:361358 | 12H11.006 | 115 | 272 | 429 | 586 | 743 | 900 | 1057 | 1214 | 1371 | 1528 |
| iPS:361365 | 12H11.007 | 116 | 273 | 430 | 587 | 744 | 901 | 1058 | 1215 | 1372 | 1529 |
| iPS:361372 | 12H11.008 | 117 | 274 | 431 | 588 | 745 | 902 | 1059 | 1216 | 1373 | 1530 |
| iPS:361379 | 12H11.009 | 118 | 275 | 432 | 589 | 746 | 903 | 1060 | 1217 | 1374 | 1531 |
| iPS:361383 | 12H11.010 | 119 | 276 | 433 | 590 | 747 | 904 | 1061 | 1218 | 1375 | 1532 |
| iPS:361387 | 12H11.011 | 120 | 277 | 434 | 591 | 748 | 905 | 1062 | 1219 | 1376 | 1533 |
| iPS:361391 | 12H11.012 | 121 | 278 | 435 | 592 | 749 | 906 | 1063 | 1220 | 1377 | 1534 |
| iPS:361395 | 12H11.013 | 122 | 279 | 436 | 593 | 750 | 907 | 1064 | 1221 | 1378 | 1535 |
| iPS:361402 | 12H11.014 | 123 | 280 | 437 | 594 | 751 | 908 | 1065 | 1222 | 1379 | 1536 |
| iPS:361406 | 2C2.005.001 | 124 | 281 | 438 | 595 | 752 | 909 | 1066 | 1223 | 1380 | 1537 |
| iPS:361412 | 2C2.005.002 | 125 | 282 | 439 | 596 | 753 | 910 | 1067 | 1224 | 1381 | 1538 |
| iPS:361418 | 2C2.005.003 | 126 | 283 | 440 | 59 | 754 | 911 | 1068 | 1225 | 1382 | 1539 |
| iPS:361424 | 2C2.005.004 | 127 | 284 | 441 | 598 | 755 | 912 | 1069 | 1226 | 1383 | 1540 |
| iPS:361430 | 2C2.005.005 | 128 | 285 | 442 | 599 | 756 | 913 | 1070 | 1227 | 1384 | 1541 |
| iPS:361436 | 2C2.005.006 | 129 | 286 | 443 | 600 | 757 | 914 | 1071 | 1228 | 1385 | 1542 |
| iPS:361442 | 2C2.005.007 | 130 | 287 | 444 | 601 | 758 | 915 | 1072 | 1229 | 1386 | 1543 |
| iPS:361448 | 2C2.005.008 | 131 | 288 | 445 | 602 | 759 | 916 | 1073 | 1230 | 1387 | 1544 |
| iPS:361454 | 2C2.005.009 | 132 | 289 | 446 | 603 | 760 | 917 | 1074 | 1231 | 1388 | 1545 |
| iPS:361460 | 2C2.005.010 | 133 | 290 | 447 | 604 | 761 | 918 | 1075 | 1232 | 1389 | 1546 |
| iPS:361466 | 2C2.005.011 | 134 | 291 | 448 | 605 | 762 | 919 | 1076 | 1233 | 1390 | 1547 |
| iPS:361472 | 2C2.005.012 | 135 | 292 | 449 | 606 | 763 | 920 | 1077 | 1234 | 1391 | 1548 |
| iPS:361478 | 2C2.005.013 | 136 | 293 | 450 | 607 | 764 | 921 | 1078 | 1235 | 1392 | 1549 |
| iPS:361485 | 2C2.005.014 | 137 | 294 | 451 | 608 | 765 | 922 | 1079 | 1236 | 1393 | 1550 |
| iPS:361845 | 18F2.013 | 138 | 295 | 452 | 609 | 766 | 923 | 1080 | 1237 | 1394 | 1551 |
| iPS:361851 | 6H1.009 | 139 | 296 | 453 | 610 | 767 | 924 | 1081 | 1238 | 1395 | 1552 |
| iPS:361855 | 2C2.005.015 | 140 | 297 | 454 | 611 | 768 | 925 | 1082 | 1239 | 1396 | 1553 |
| iPS:336067 | 5G12.006 | 141 | 298 | 455 | 612 | 769 | 926 | 1083 | 1240 | 1397 | 1554 |
| iPS:336169 | 17B11.002 | 142 | 299 | 456 | 613 | 770 | 927 | 1084 | 1241 | 1398 | 1555 |
| iPS:361127 | 5G12.006.001 | 143 | 300 | 457 | 614 | 771 | 928 | 1085 | 1242 | 1399 | 1556 |
| iPS:361136 | 5G12.006.002 | 144 | 301 | 458 | 615 | 772 | 929 | 1086 | 1243 | 1400 | 1557 |
| iPS:361140 | 5G12.006.003 | 145 | 302 | 459 | 616 | 773 | 930 | 1087 | 1244 | 1401 | 1558 |
| iPS:359919 | 5G12.006.004 | 146 | 303 | 460 | 617 | 774 | 931 | 1088 | 1245 | 1402 | 1559 |
| iPS:361144 | 5G12.006.005 | 147 | 304 | 461 | 618 | 775 | 932 | 1089 | 1246 | 1403 | 1560 |
| iPS:361151 | 5G12.006.006 | 148 | 305 | 462 | 619 | 776 | 933 | 1090 | 1247 | 1404 | 1561 |
| iPS:361491 | 17B11.002.001 | 149 | 306 | 463 | 620 | 777 | 934 | 1091 | 1248 | 1405 | 1562 |
| iPS:361499 | 17B11.002.002 | 150 | 307 | 464 | 621 | 778 | 935 | 1092 | 1249 | 1406 | 1563 |
| iPS:361503 | 17B11.002.003 | 151 | 308 | 465 | 622 | 779 | 936 | 1093 | 1250 | 1407 | 1564 |
| iPS:361507 | 17B11.002.004 | 152 | 309 | 466 | 623 | 780 | 937 | 1094 | 1251 | 1408 | 1565 |
| iPS:361514 | 17B11.002.005 | 153 | 310 | 467 | 624 | 781 | 938 | 1095 | 1252 | 1409 | 1566 |
| iPS:360582 | 17B11.002.006 | 154 | 311 | 468 | 625 | 782 | 939 | 1096 | 1253 | 1410 | 1567 |
| iPS:361518 | 17B11.002.007 | 155 | 312 | 469 | 626 | 783 | 940 | 1097 | 1254 | 1411 | 1568 |
| iPS:360570 | 17B11.002.008 | 156 | 313 | 470 | 627 | 784 | 941 | 1098 | 1255 | 1412 | 1569 |
| iPS:362051 | 5G12.005.001 | 157 | 314 | 471 | 628 | 785 | 942 | 1099 | 1256 | 1413 | 1570 |

TABLE 10
Variable Light (VL) Region Amino Acid Sequences of Example Anti-GIPR Antibodies

| | | | SEQ |
|---|---|---|---|
| Identifier | Construct | VL | ID NO: |
| iPS:336175 | 2C2.005 | QSVLTQPPSASGTPGQRVTISCSGSSSNIGSNTVNWYQHLPGTAPKLLIYTNNQRPS | 1 |
| | | GVPDRFSGSKSGTSASLAISGLQSEDEADYFCATFDDSLNGPVFGGGTKLTVLG | |
| iPS:335914 | 4B1 | DIQMTQSPSSLSASIGDRVTITCRASQDIRDYLGWYQQKPGKAPKRLIYGASSLQS | 2 |
| | | GVPSRFSGSGSGTEFTLTISSLQPEDFATYYCLQHNNYPFTFGPGTKVDIKR | |
| iPS:335938 | 6H1 | DIQMTQSPSSLSASIGDRVTITCRASQDIRDYLGWYQQKPGKAPKRLIYGASSLQS | 3 |
| | | GVPSRFSGSGSGTEFTLTISSLQPEDFATYYCLQHNNYPFTFGPGTKVDIKR | |
| iPS:335941 | 2F11 | DIQMTQSPSSLSASVGDRVTITCQASQDISNYLNWYQQKPGKAPKLLIYDASNLET | 4 |
| | | GVPSRFSGSGSGTDFSFTISSLQPEDIATYYCQQYDILLTFGGGTKVEIKR | |
| iPS:335970 | 5C2 | DIVMTQSPDSLAVSLGERATINCKSSQSVLSSSNNKNYIAWYQQQPGHPPKLLIYW | 5 |
| | | ASTRESGVPDRFSGSGSGTDFTLTISSLQAEDVAVFYCQQYYSTPWTFGQGTKVEI | |
| | | KR | |
| iPS:335978 | 13H12 | DIVMTQSPDSLAVSLGERATINCKSSQSVLSSSNNKNYIAWYQQKPGHPPKLLIYW | 6 |
| | | ASTRESGVPDRFSGSGSGTDFTLTISSLQAEDVAVFYCQQYYSTPWTFGQGTKVEI | |
| | | KR | |
| iPS:335986 | 11C1 | DIVMTQSPDSLSVSLGERATINCKSSQSVLSSSNNKNYLAWYQQKPGQPPNLLIY | 7 |
| | | WTSTRDSGVPDRFSGSGSGTDFTLTINSLQAEDVAVYYCQQYYRTPWTFGQGTK | |
| | | VEIKR | |
| iPS:335994 | 12H11 | DIVMTQSPDSLSVSLGERATINCKSSQSVLSSSNNKNYLAWYQQKPGQPPNLLIY | 8 |
| | | WTSTRDSGVPDRFSGSGSGTDFTLTINSLQAEDVAVYYCQQYYRTPWTFGQGTK | |
| | | VEIKR | |
| iPS:336024 | 18E3 | EIVLTQSPGTLSLSPGERATLSCRASQSISYSYLAWYQQKPGQAPRLLIYGASSRAT | 9 |
| | | GIPDRFSGSGSGTDFTLTISRQEPDDFAVYYCQQYGSSPLTFGGGTKVEIKR | |
| iPS:336041 | 2G10_LC1 | EIVMTQSPATLSVSPGERATLSCRASQSVSSNLAWYQQKPGQAPRLLIYGAATRA | 10 |
| | | TGIPARVSGSGSGTEFTLTISSLQSEDFAVYYCQQYNNWPLTFGGGTKVEIKR | |
| iPS:336077 | 4H9.004 | DIQMTQSPSSLSASVGDRVTITCRASQGIRNELGWYQQKPGKAPKRLIYGASSLQS | 11 |
| | | GVPSRFSGSGSGTEFTLTISSLQPEDFVTYYCLQHNSYPFTFGPGTKVDVKR | |
| iPS:336088 | 6A5.004 | DIQMTQSPSSLSASVGDRVTITCQASQDITNYLNWYQQKPGKAPKLLIYDASNLEP | 12 |
| | | GVPSRFSGSGSGTDFTFTISSLQPEDIATYYCQQYDDLFTFGPGTKVDIKR | |
| iPS:336099 | 17H11.004 | DIQMTQSPSSVSASVGDRVTITCRASQGLIIWLAWYQQKPGKAPKLLIYAASSLQS | 13 |
| | | GVPSRFSGSGSGTDFTLTISSLQPEDFATYYCQQTNSFPPTFGQGTKVEIKR | |
| iPS:359621 | 17H11.004.001 | DIQMTQSPSSVSASVGDRVTITCRASQGLIIWLAWYQQKPGKAPKLLIYAASSLQS | 14 |
| | | GVPSRFSGSGSGTDFTLTISSLQPEDFATYYCQQTNSFPPTFGQGTKVEIKR | |
| iPS:359781 | 4H9.004.001 | DIQMTQSPSSLSASVGDRVTITCRASQGIRNELGWYQQKPGKAPKLLIYGASSLQS | 15 |
| | | GVPSRFSGSGSGTEFTLTISSLQPEDFVTYYCLQHNSYPFTFGQGTKVDVKR | |
| iPS:360929 | 4H9.004.002 | DIQMTQSPSSLSASVGDRVTITCRASQGIRNELGWYQQKPGKAPKLLIYGASSLQS | 16 |
| | | GVPSRFSGSGSGTEFTLTISSLQPEDFVTYYCLQHNSYPFTFGQGTKVDVKR | |
| iPS:360936 | 4H9.004.003 | DIQMTQSPSSLSASVGDRVTITCRASQGIRNELGWYQQKPGKAPKLLIYGASSLQS | 17 |
| | | GVPSRFSGSGSGTEFTLTISSLQPEDFVTYYCLQHNSYPFTFGQGTKVDVKR | |
| iPS:360943 | 4H9.004.004 | DIQMTQSPSSLSASVGDRVTITCRASQGIRNELGWYQQKPGKAPKLLIYGASSLQS | 18 |
| | | GVPSRFSGSGSGTEFTLTISSLQPEDFVTYYCLQHNSYPFTFGPGTKVDVKR | |
| iPS:360949 | 4H9.004.005 | DIQMTQSPSSLSASVGDRVTITCRASQGIRNELGWYQQKPGKAPKRLIYGASSLQS | 19 |
| | | GVPSRFSGSGSGTEFTLTISSLQPEDFVTYYCLQHNSYPFTFGQGTKVDVKR | |
| iPS:359761 | 4H9.004.006 | DIQMTQSPSSLSASVGDRVTITCRASQGIRNELGWYQQKPGKAPKLLIYGASSLQS | 20 |
| | | GVPSRFSGSGSGTEFTLTISSLQPEDFVTYYCLQHNSYPFTFGQGTKVDVKR | |
| iPS:360955 | 4B1.010 | DIQMTQSPSSLSASIGDRVTITCRASQDIRDYLGWYQQKPGKAPKLLIYGASSLQS | 21 |
| | | GVPSRFSGSGSGTEFTLTISSLQPEDFATYYCLQHNNYPFTFGQGTKVDIKR | |
| iPS:360962 | 4B1.011 | DIQMTQSPSSLSASIGDRVTITCRASQDIRDYLGWYQQKPGKAPKRLIYGASSLQS | 22 |
| | | GVPSRFSGSGSGTEFTLTISSLQPEDFATYYCLQHNNYPFTFGQGTKVDIKR | |
| iPS:360968 | 4B1.012 | DIQMTQSPSSLSASIGDRVTITCRASQDIRDYLGWYQQKPGKAPKLLIYGASSLQS | 23 |
| | | GVPSRFSGSGSGTEFTLTISSLQPEDFATYYCLQHNNYPFTFGPGTKVDIKR | |
| iPS:360974 | 4B1.013 | DIQMTQSPSSLSASIGDRVTITCRASQDIRDYLGWYQQKPGKAPKLLIYGASSLQS | 24 |
| | | GVPSRFSGSGSGTEFTLTISSLQPEDFATYYCLQHNNYPFTFGQGTKVDIKR | |
| iPS:360978 | 4B1.014 | DIQMTQSPSSLSASIGDRVTITCRASQDIRDYLGWYQQKPGKAPKLLIYGASSLQS | 25 |
| | | GVPSRFSGSGSGTEFTLTISSLQPEDFATYYCLQHNNYPFTFGQGTKVDIKR | |
| iPS:359785 | 4B1.015 | DIQMTQSPSSLSASIGDRVTITCRASQDIRDYLGWYQQKPGKAPKLLIYGASSLQS | 26 |
| | | GVPSRFSGSGSGTEFTLTISSLQPEDFATYYCLQHNNYPFTFGQGTKVDIKR | |
| iPS:360982 | 4B1.016 | DIQMTQSPSSLSASIGDRVTITCRASQDIRDYLGWYQQKPGKAPKLLIYGASSLQS | 27 |
| | | GVPSRFSGSGSGTEFTLTISSLQPEDFATYYCLQHNNYPFTFGQGTKVDIKR | |
| iPS:335922 | 18F2 | DIQMTQSPSSLSASIGDRVTITCRASQDLRNYLGWYHQKPGKAPKRLIYGASSLQS | 28 |
| | | GVPSRFSGSGSGTEFTLTISSLQPEDFATYYCLQHNNYPFTFGPGTKVDIKR | |
| iPS:360986 | 18F2.002 | DIQMTQSPSSLSASIGDRVTITCRASQDLRNYLGWYQQKPGKAPKLLIYGASSLQS | 29 |
| | | GVPSRFSGSGSGTEFTLTISSLQPEDFATYYCLQHNNYPFTFGPGTKVDIKR | |
| iPS:360995 | 18F2.003 | DIQMTQSPSSLSASIGDRVTITCRASQDLRNYLGWYQQKPGKAPKLLIYGASSLQS | 30 |
| | | GVPSRFSGSGSGTEFTLTISSLQPEDFATYYCLQHNNYPFTFGPGTKVDIKR | |
| iPS:360999 | 18F2.004 | DIQMTQSPSSLSASIGDRVTITCRASQDLRNYLGWYHQKPGKAPKLLIYGASSLQS | 31 |
| | | GVPSRFSGSGSGTEFTLTISSLQPEDFATYYCLQHNNYPFTFGPGTKVDIKR | |
| iPS:361005 | 18F2.005 | DIQMTQSPSSLSASIGDRVTITCRASQDLRNYLGWYQQKPGKAPKRLIYGASSLQS | 32 |
| | | GVPSRFSGSGSGTEFTLTISSLQPEDFATYYCLQHNNYPFTFGPGTKVDIKR | |
| iPS:361009 | 18F2.006 | DIQMTQSPSSLSASIGDRVTITCRASQDLRNYLGWYQQKPGKAPKRLIYGASSLQS | 33 |
| | | GVPSRFSGSGSGTEFTLTISSLQPEDFATYYCLQHNNYPFTFGPGTKVDIKR | |
| iPS:361013 | 18F2.007 | DIQMTQSPSSLSASIGDRVTITCRASQDLRNYLGWYHQKPGKAPKLLIYGASSLQS | 34 |
| | | GVPSRFSGSGSGTEFTLTISSLQPEDFATYYCLQHNNYPFTFGPGTKVDIKR | |
| iPS:361017 | 18F2.008 | DIQMTQSPSSLSASIGDRVTITCRASQDLRNYLGWYHQKPGKAPKRLIYGASSLQS | 35 |
| | | GVPSRFSGSGSGTEFTLTISSLQPEDFATYYCLQHNNYPFTFGPGTKVDIKR | |
| iPS:361021 | 18F2.009 | DIQMTQSPSSLSASIGDRVTITCRASQDLRNYLGWYQQKPGKAPKLLIYGASSLQS | 36 |
| | | GVPSRFSGSGSGTEFTLTISSLQPEDFATYYCLQHNNYPFTFGPGTKVDIKR | |
| iPS:361028 | 18F2.010 | DIQMTQSPSSLSASIGDRVTITCRASQDLRNYLGWYQQKPGKAPKLLIYGASSLQS | 37 |
| | | GVPSRFSGSGSGTEFTLTISSLQPEDFATYYCLQHNNYPFTFGPGTKVDIKR | |
| iPS:360535 | 18F2.011 | DIQMTQSPSSLSASIGDRVTITCRASQDLRNYLGWYQQKPGKAPKLLIYGASSLQS | 38 |
| | | GVPSRFSGSGSGTEFTLTISSLQPEDFATYYCLQHNNYPFTFGQGTKVDIKR | |
| iPS:361035 | 18F2.012 | DIQMTQSPSSLSASIGDRVTITCRASQDLRNYLGWYQQKPGKAPKLLIYGASSLQS | 39 |
| | | GVPSRFSGSGSGTEFTLTISSLQPEDFATYYCLQHNNYPFTFGPGTKVDIKR | |
| iPS:359940 | 2F11.002 | DIQMTQSPSSLSASVGDRVTITCQASQDISNYLNWYQQKPGKAPKLLIYDASNLET | 40 |
| | | GVPSRFSGSGSGTDFSLTISSLQPEDFATYYCQQYDILLTFGGGTKVEIKR | |
| iPS:361039 | 2F11.003 | DIQMTQSPSSLSASVGDRVTITCQASQDISNYLNWYQQKPGKAPKLLIYDASNLET | 41 |
| | | GVPSRFSGSGSGTDFSLTISSLQPEDFATYYCQQYDILLTFGGGTKVEIKR | |
| iPS:361043 | 2F11.004 | DIQMTQSPSSLSASVGDRVTITCQASQDISNYLNWYQQKPGKAPKLLIYDASNLET | 42 |
| | | GVPSRFSGSGSGTDFSLTISSLQPEDIATYYCQQYDILLTFGGGTKVEIKR | |
| iPS:361049 | 2F11.005 | DIQMTQSPSSLSASVGDRVTITCQASQDISNYLNWYQQKPGKAPKLLIYDASNLET | 43 |
| | | GVPSRFSGSGSGTDFSFTISSLQPEDFATYYCQQYDILLTFGGGTKVEIKR | |
| iPS:361055 | 2F11.006 | DIQMTQSPSSLSASVGDRVTITCQASQDISNYLNWYQQKPGKAPKLLIYDASNLET | 44 |
| | | GVPSRFSGSGSGTDFSLTISSLQPEDIATYYCQQYDILLTFGGGTKVEIKR | |
| iPS:361059 | 2F11.007 | DIQMTQSPSSLSASVGDRVTITCQASQDISNYLNWYQQKPGKAPKLLIYDASNLET | 45 |
| | | GVPSRFSGSGSGTDFSFTISSLQPEDFATYYCQQYDILLTFGGGTKVEIKR | |
| iPS:361063 | 2F11.008 | DIQMTQSPSSLSASVGDRVTITCQASQDISNYLNWYQQKPGKAPKLLIYDASNLET | 46 |
| | | GVPSRFSGSGSGTDFSFTISSLQPEDIATYYCQQYDILLTFGGGTKVEIKR | |
| iPS:359949 | 2F11.009 | DIQMTQSPSSLSASVGDRVTITCQASQDISNYLNWYQQKPGKAPKLLIYDASNLET | 47 |
| | | GVPSRFSGSGSGTDFSLTISSLQPEDFATYYCQQYDILLTFGGGTKVEIKR | |
| iPS:359956 | 2F11.010 | DIQMTQSPSSLSASVGDRVTITCQASQDISNYLNWYQQKPGKAPKLLIYDASNLET | 48 |
| | | GVPSRFSGSGSGTDFSLTISSLQPEDFATYYCQQYDILLTFGGGTKVEIKR | |
| iPS:359865 | 6H1.002 | DIQMTQSPSSLSASIGDRVTITCRASQDIRDYLGWYQQKPGKAPKRLIYGASSLQS | 49 |
| | | GVPSRFSGSGSGTEFTLTISSLQPEDFATYYCLQHNNYPFTFGPGTKVDIKR | |
| iPS:359869 | 6H1.003 | DIQMTQSPSSLSASIGDRVTITCRASQDIRDYLGWYQQKPGKAPKRLIYGASSLQS | 50 |
| | | GVPSRFSGSGSGTEFTLTISSLQPEDFATYYCLQHNNYPFTFGPGTKVDIKR | |
| iPS:359873 | 6H1.004 | DIQMTQSPSSLSASIGDRVTITCRASQDIRDYLGWYQQKPGKAPKLLIYGASSLQS | 51 |
| | | GVPSRFSGSGSGTEFTLTISSLQPEDFATYYCLQHNNYPFTFGQGTKVDIKR | |
| iPS:359877 | 6H1.005 | DIQMTQSPSSLSASIGDRVTITCRASQDIRDYLGWYQQKPGKAPKLLIYGASSLQS | 52 |
| | | GVPSRFSGSGSGTEFTLTISSLQPEDFATYYCLQHNNYPFTFGQGTKVDIKR | |
| iPS:361067 | 6H1.006 | DIQMTQSPSSLSASIGDRVTITCRASQDIRDYLGWYQQKPGKAPKLLIYGASSLQS | 53 |
| | | GVPSRFSGSGSGTEFTLTISSLQPEDFATYYCLQHNNYPFTFGPGTKVDIKR | |
| iPS:361071 | 6H1.007 | DIQMTQSPSSLSASIGDRVTITCRASQDIRDYLGWYQQKPGKAPKLLIYGASSLQS | 54 |
| | | GVPSRFSGSGSGTEFTLTISSLQPEDFATYYCLQHNNYPFTFGPGTKVDIKR | |
| iPS:361075 | 6H1.008 | DIQMTQSPSSLSASIGDRVTITCRASQDIRDYLGWYQQKPGKAPKLLIYGASSLQS | 55 |
| | | GVPSRFSGSGSGTEFTLTISSLQPEDFATYYCLQHNNYPFTFGPGTKVDIKR | |
| iPS:361079 | 6A5.004.001 | DIQMTQSPSSLSASVGDRVTITCQASQDITNYLNWYQQKPGKAPKLLIYDASNLEP | 56 |
| | | GVPSRFSGSGSGTDFTLTISSLQPEDFATYYCQQYDDLFTFGPGTKVDIKR | |
| iPS:361085 | 6A5.004.002 | DIQMTQSPSSLSASVGDRVTITCQASQDITNYLNWYQQKPGKAPKLLIYDASNLEP | 57 |
| | | GVPSRFSGSGSGTDFTLTISSLQPEDIATYYCQQYDDLFTFGPGTKVDIKR | |
| iPS:361091 | 6A5.004.003 | DIQMTQSPSSLSASVGDRVTITCQASQDITNYLNWYQQKPGKAPKLLIYDASNLEP | 58 |
| | | GVPSRFSGSGSGTDFTLTISSLQPEDFATYYCQQYDDLFTFGPGTKVDIKR | |
| iPS:361095 | 6A5.004.004 | DIQMTQSPSSLSASVGDRVTITCQASQDITNYLNWYQQKPGKAPKLLIYDASNLEP | 59 |
| | | GVPSRFSGSGSGTDFTFTISSLQPEDFATYYCQQYDDLFTFGPGTKVDIKR | |
| iPS:361101 | 6A5.004.005 | DIQMTQSPSSLSASVGDRVTITCQASQDITNYLNWYQQKPGKAPKLLIYDASNLEP | 60 |
| | | GVPSRFSGSGSGTDFTLTISSLQPEDIATYYCQQYDDLFTFGPGTKVDIKR | |
| iPS:361105 | 6A5.004.006 | DIQMTQSPSSLSASVGDRVTITCQASQDITNYLNWYQQKPGKAPKLLIYDASNLEP | 61 |
| | | GVPSRFSGSGSGTDFTFTISSLQPEDFATYYCQQYDDLFTFGPGTKVDIKR | |
| iPS:361109 | 6A5.004.007 | DIQMTQSPSSLSASVGDRVTITCQASQDITNYLNWYQQKPGKAPKLLIYDASNLEP | 62 |
| | | GVPSRFSGSGSGTDFTFTISSLQPEDIATYYCQQYDDLFTFGPGTKVDIKR | |
| iPS:361113 | 6A5.004.008 | DIQMTQSPSSLSASVGDRVTITCQASQDITNYLNWYQQKPGKAPKLLIYDASNLEP | 63 |
| | | GVPSRFSGSGSGTDFTLTISSLQPEDFATYYCQQYDDLFTFGPGTKVDIKR | |
| iPS:361120 | 6A5.004.009 | DIQMTQSPSSLSASVGDRVTITCQASQDITNYLNWYQQKPGKAPKLLIYDASNLEP | 64 |
| | | GVPSRFSGSGSGTDFTLTISSLQPEDFATYYCQQYDDLFTFGPGTKVDIKR | |
| iPS:359896 | 6A5.004.010 | DIQMTQSPSSLSASVGDRVTITCQASQDITNYLNWYQQKPGKAPKLLIYDASNLEP | 65 |
| | | GVPSRFSGSGSGTDFTLTISSLQPEDFATYYCQQYDDLFTFGQGTKVDIKR | |
| iPS:359890 | 6A5.004.011 | DIQMTQSPSSLSASVGDRVTITCQASQDITNYLNWYQQKPGKAPKLLIYDASNLEP | 66 |
| | | GVPSRFSGSGSGTDFTLTISSLQPEDFATYYCQQYDDLFTFGQGTKVDIKR | |
| iPS:359567 | 2A11.002 | EIVLTQSPGTLSLSPGERATLSCRASQIFTSTYLAWYQQKPGQAPRLLIYGASSRAT | 67 |
| | | GIPDRFSGSGSGTDFTLTISRLEPEDFAVYYCQQYGSSPRFGQGTRLEIKR | |
| iPS:335965 | 2A11.003 | EIVLTQSPGTLSLSPGERATLSCRASQIFTSTYLAWYQQKPGQAPRLLIYGASSRAT | 68 |
| | | GIPDRFSGSGSGTDFTLTISRLEPEDFAVYYCQQYGSSPRFGQGTRLEIKR | |
| iPS:361158 | 2A11.004 | EIVLTQSPGTLSLSPGERATLSCRASQIFTSTYLAWYQQKPGQAPRLLIYGASSRAT | 69 |
| | | GIPDRFSGSGSGTDFTLTISRLEPEDFAVYYCQQYGSSPRFGQGTRLEIKR | |
| iPS:361165 | 2A11.005 | EIVLTQSPGTLSLSPGERATLSCRASQIFTSTYLAWYQQKPGQAPRLLIYGASSRAT | 70 |
| | | GIPDRFSGSGSGTDFTLTISRLEPEDFAVYYCQQYGSSPRFGQGTRLEIKR | |
| iPS:361172 | 2G10_LC1.003 | EIVMTQSPATLSVSPGERATLSCRASQSVSSNLAWYQQKPGQAPRLLIYGAATRA | 71 |
| | | TGIPARFSGSGSGTEFTLTISSLQSEDFAVYYCQQYNNWPLTFGGGTKVEIKR | |
| iPS:361178 | 2G10_LC1.004 | EIVMTQSPATLSVSPGERATLSCRASQSVSSNLAWYQQKPGQAPRLLIYGAATRA | 72 |
| | | TGIPARFSGSGSGTEFTLTISSLQSEDFAVYYCQQYNNWPLTFGGGTKVEIKR | |
| iPS:361185 | 2G10_LC1.005 | EIVMTQSPATLSVSPGERATLSCRASQSVSSNLAWYQQKPGQAPRLLIYGAATRA | 73 |
| | | TGIPARFSGSGSGTEFTLTISSLQSEDFAVYYCQQYNNWPLTFGGGTKVEIKR | |
| iPS:361192 | 2G10_LC1.006 | EIVMTQSPATLSVSPGERATLSCRASQSVSSNLAWYQQKPGQAPRLLIYGAATRA | 74 |
| | | TGIPARVSGSGSGTEFTLTISSLQSEDFAVYYCQQYNNWPLTFGGGTKVEIKR | |
| iPS:359609 | 2G10_LC1.007 | EIVMTQSPATLSVSPGERATLSCRASQSVSSNLAWYQQKPGQAPRLLIYGAATRA | 75 |
| | | TGIPARFSGSGSGTEFTLTISSLEPEDFAVYYCQQYNNFPLTFGGGTKVEIKR | |
| iPS:359615 | 2G10_LC1.008 | EIVMTQSPATLSVSPGERATLSCRASQSVSSNLAWYQQKPGQAPRLLIYGAATRA | 76 |
| | | TGIPARFSGSGSGTEFTLTISSLEPEDFAVYYCQQYNNYPLTFGGGTKVEIKR | |
| iPS:361196 | 2G10_LC1.009 | EIVMTQSPATLSVSPGERATLSCRASQSVSSNLAWYQQKPGQAPRLLIYGAATRA | 77 |
| | | TGIPARFSGSGSGTEFTLTISSLEPEDFAVYYCQQYNNWPLTFGGGTKVEIKR | |
| iPS:361202 | 2G10_LC1.010 | EIVMTQSPATLSVSPGERATLSCRASQSVSSNLAWYQQKPGQAPRLLIYGAATRA | 78 |
| | | TGIPARFSGSGSGTEFTLTISSLEPEDFAVYYCQQYNNWPLTFGGGTKVEIKR | |
| iPS:359644 | 18E3.002 | EIVLTQSPGTLSLSPGERATLSCRASQSISYSYLAWYQQKPGQAPRLLIYGASSRAT | 79 |
| | | GIPDRFSGSGSGTDFTLTISRLEPDDFAVYYCQQYGSSPLTFGGGTKVEIKR | |
| iPS:361206 | 18E3.003 | EIVLTQSPGTLSLSPGERATLSCRASQSISYSYLAWYQQKPGQAPRLLIYGASSRAT | 80 |
| | | GIPDRFSGSGSGTDFTLTISRQEPDDFAVYYCQQYGSSPLTFGGGTKVEIKR | |
| iPS:359628 | 18E3.004 | EIVLTQSPGTLSLSPGERATLSCRASQSISYSYLAWYQQKPGQAPRLLIYGASSRAT | 81 |
| | | GIPDRFSGSGSGTDFTLTISRLEPDDFAVYYCQQYGSSPLTFGGGTKVEIKR | |
| iPS:359637 | 18E3.005 | EIVLTQSPGTLSLSPGERATLSCRASQSISYSYLAWYQQKPGQAPRLLIYGASSRAT | 82 |
| | | GIPDRFSGSGSGTDFTLTISRLEPDDFAVYYCQQYGSSPLTFGGGTKVEIKR | |
| iPS:361210 | 18E3.006 | EIVLTQSPGTLSLSPGERATLSCRASQSISYSYLAWYQQKPGQAPRLLIYGASSRAT | 83 |
| | | GIPDRFSGSGSGTDFTLTISRLEPDDFAVYYCQQYGSSPLTFGGGTKVEIKR | |
| iPS:361214 | 18E3.007 | EIVLTQSPGTLSLSPGERATLSCRASQSISYSYLAWYQQKPGQAPRLLIYGASSRAT | 84 |
| | | GIPDRFSGSGSGTDFTLTISRQEPDDFAVYYCQQYGSSPLTFGGGTKVEIKR | |
| iPS:361218 | 18E3.008 | EIVLTQSPGTLSLSPGERATLSCRASQSISYSYLAWYQQKPGQAPRLLIYGASSRAT | 85 |
| | | GIPDRFSGSGSGTDFTLTISRQEPDDFAVYYCQQYGSSPLTFGGGTKVEIKR | |
| iPS:361222 | 5C2.006 | DIVMTQSPDSLAVSLGERATINCKSSQSVLSSSNNKNYIAWYQQQPGHPPKLLIYW | 86 |
| | | ASTRESGVPDRFSGSGSGTDFTLTISSLQAEDVAVFYCQQYYSTPWTFGQGTKVEI | |
| | | KR | |
| iPS:361229 | 5C2.007 | DIVMTQSPDSLAVSLGERATINCKSSQSVLSSSNNKNYIAWYQQQPGHPPKLLIYW | 87 |
| | | ASTRESGVPDRFSGSGSGTDFTLTISSLQAEDVAVFYCQQYYSTPWTFGQGTKVEI | |
| | | KR | |
| iPS:361236 | 5C2.008 | DIVMTQSPDSLAVSLGERATINCKSSQSVLSSSNNKNYIAWYQQQPGHPPKLLIYW | 88 |
| | | ASTRESGVPDRFSGSGSGTDFTLTISSLQAEDVAVFYCQQYYSTPWTFGQGTKVEI | |
| | | KR | |
| iPS:359685 | 5C2.009 | DIVMTQSPDSLAVSLGERATINCKSSQSVLSSSNNKNYIAWYQQQPGHPPKLLIYW | 89 |
| | | ASTRESGVPDRFSGSGSGTDFTLTISSLQAEDVAVFYCQQYYSTPWTFGQGTKVEI | |
| | | KR | |
| iPS:361240 | 5C2.010 | DIVMTQSPDSLAVSLGERATINCKSSQSVLSSSNNKNYIAWYQQQPGHPPKLLIYW | 90 |
| | | ASTRESGVPDRFSGSGSGTDFTLTISSLQAEDVAVFYCQQYYSTPWTFGQGTKVEI | |
| | | KR | |
| iPS:361247 | 5C2.011 | DIVMTQSPDSLAVSLGERATINCKSSQSVLSSSNNKNYIAWYQQQPGHPPKLLIYW | 91 |
| | | ASTRESGVPDRFSGSGSGTDFTLTISSLQAEDVAVFYCQQYYSTPWTFGQGTKVEI | |
| | | KR | |
| iPS:361254 | 5C2.012 | DIVMTQSPDSLAVSLGERATINCKSSQSVLSSSNNKNYIAWYQQQPGHPPKLLIYW | 92 |
| | | ASTRESGVPDRFSGSGSGTDFTLTISSLQAEDVAVFYCQQYYSTPWTFGQGTKVEI | |
| | | KR | |
| iPS:361261 | 5C2.013 | DIVMTQSPDSLAVSLGERATINCKSSQSVLSSSNNKNYIAWYQQQPGHPPKLLIYW | 93 |
| | | ASTRESGVPDRFSGSGSGTDFTLTISSLQAEDVAVFYCQQYYSTPWTFGQGTKVEI | |
| | | KR | |
| iPS:361268 | 5C2.014 | DIVMTQSPDSLAVSLGERATINCKSSQSVLSSSNNKNYIAWYQQQPGHPPKLLIYW | 94 |
| | | ASTRESGVPDRFSGSGSGTDFTLTISSLQAEDVAVFYCQQYYSTPWTFGQGTKVEI | |
| | | KR | |
| iPS:359669 | 5C2.015 | DIVMTQSPDSLAVSLGERATINCKSSQSVLSSSNNKNYIAWYQQKPGQPPKLLIYW | 95 |
| | | ASTRESGVPDRFSGSGSGTDFTLTISSLQAEDVAVFYCQQYYSTPWTFGQGTKVEI | |
| | | KR | |
| iPS:359678 | 5C2.016 | DIVMTQSPDSLAVSLGERATINCKSSQSVLSSSNNKNYIAWYQQKPGQPPKLLIYW | 96 |
| | | ASTRESGVPDRFSGSGSGTDFTLTISSLQAEDVAVFYCQQYYSTPWTFGQGTKVEI | |
| | | KR | |
| iPS:361275 | 11C1.002 | DIVMTQSPDSLSVSLGERATINCKSSQSVLSSSNNKNYLAWYQQKPGQPPNLLIY | 97 |
| | | WTSTRESGVPDRFSGSGSGTDFTLTINSLQAEDVAVYYCQQYYRTPWTFGQGTKV | |
| | | EIKR | |
| iPS:361282 | 11C1.003 | DIVMTQSPDSLSVSLGERATINCKSSQSVLSSSNNKNYLAWYQQKPGQPPNLLIY | 98 |
| | | WTSTRESGVPDRFSGSGSGTDFTLTINSLQAEDVAVYYCQQYYRTPWTFGQGTKV | |
| | | EIKR | |
| iPS:361289 | 11C1.004 | DIVMTQSPDSLSVSLGERATINCKSSQSVLSSSNNKNYLAWYQQKPGQPPNLLIY | 99 |
| | | WTSTRDSGVPDRFSGSGSGTDFTLTINSLQAEDVAVYYCQQYYRTPWTFGQGTK | |
| | | VEIKR | |
| iPS:359712 | 11C1.005 | DIVMTQSPDSLSVSLGERATINCKSSQSVLSSSNNKNYLAWYQQKPGQPPNLLIY | 100 |
| | | WTSTRESGVPDRFSGSGSGTDFTLTINSLQAEDVAVYYCQQYYRTPWTFGQGTKV | |
| | | EIKR | |
| iPS:361293 | 11C1.006 | DIVMTQSPDSLSVSLGERATINCKSSQSVLSSSNNKNYLAWYQQKPGQPPNLLIY | 101 |
| | | WTSTRESGVPDRFSGSGSGTDFTLTINSLQAEDVAVYYCQQYYRTPWTFGQGTKV | |
| | | EIKR | |
| iPS:361297 | 11C1.007 | DIVMTQSPDSLSVSLGERATINCKSSQSVLSSSNNKNYLAWYQQKPGQPPNLLIY | 102 |
| | | WTSTRDSGVPDRFSGSGSGTDFTLTINSLQAEDVAVYYCQQYYRTPWTFGQGTK | |
| | | VEIKR | |
| iPS:361301 | 11C1.008 | DIVMTQSPDSLSVSLGERATINCKSSQSVLSSSNNKNYLAWYQQKPGQPPNLLIY | 103 |
| | | WTSTRDSGVPDRFSGSGSGTDFTLTINSLQAEDVAVYYCQQYYRTPWTFGQGTK | |
| | | VEIKR | |
| iPS:359703 | 11C1.009 | DIVMTQSPDSLAVSLGERATINCKSSQSVLSSSNNKNYLAWYQQKPGQPPKLLIY | 104 |
| | | WTSTRESGVPDRFSGSGSGTDFTLTINSLQAEDVAVYYCQQYYRTPWTFGQGTKV | |
| | | EIKR | |
| iPS:361305 | 11C1.010 | DIVMTQSPDSLSVSLGERATINCKSSQSVLSSSNNKNYLAWYQQKPGQPPNLLIY | 105 |
| | | WTSTRESGVPDRFSGSGSGTDFTLTINSLQAEDVAVYYCQQYYRTPWTFGQGTKV | |
| | | EIKR | |
| iPS:361312 | 13H12.002 | DIVMTQSPDSLAVSLGERATINCKSSQSVLSSSNNKNYIAWYQQKPGHPPKLLIYW | 106 |
| | | ASTRESGVPDRFSGSGSGTDFTLTISSLQAEDVAVFYCQQYYSTPWTFGQGTKVEI | |
| | | KR | |
| iPS:359744 | 13H12.003 | DIVMTQSPDSLAVSLGERATINCKSSQSVLSSSNNKNYIAWYQQKPGHPPKLLIYW | 107 |
| | | ASTRESGVPDRFSGSGSGTDFTLTISSLQAEDVAVFYCQQYYSTPWTFGQGTKVEI | |
| | | KR | |
| iPS:361319 | 13H12.004 | DIVMTQSPDSLAVSLGERATINCKSSQSVLSSSNNKNYIAWYQQKPGHPPKLLIYW | 108 |
| | | ASTRESGVPDRFSGSGSGTDFTLTISSLQAEDVAVFYCQQYYSTPWTFGQGTKVEI | |
| | | KR | |
| iPS:359737 | 13H12.005 | DIVMTQSPDSLAVSLGERATINCKSSQSVLSSSNNKNYIAWYQQKPGQPPKLLIYW | 109 |
| | | ASTRESGVPDRFSGSGSGTDFTLTISSLQAEDVAVFYCQQYYSTPWTFGQGTKVEI | |
| | | KR | |
| iPS:361326 | 13H12.006 | DIVMTQSPDSLAVSLGERATINCKSSQSVLSSSNNKNYIAWYQQKPGQPPKLLIYW | 110 |
| | | ASTRESGVPDRFSGSGSGTDFTLTISSLQAEDVAVFYCQQYYSTPWTFGQGTKVEI | |
| | | KR | |
| iPS:361330 | 12H11.002 | DIVMTQSPDSLSVSLGERATINCKSSQSVLSSSNNKNYLAWYQQKPGQPPNLLIY | 111 |
| | | WTSTRDSGVPDRFSGSGSGTDFTLTINSLQAEDVAVYYCQQYYRTPWTFGQGTK | |
| | | VEIKR | |
| iPS:361337 | 12H11.003 | DIVMTQSPDSLSVSLGERATINCKSSQSVLSSSNNKNYLAWYQQKPGQPPNLLIY | 112 |
| | | WTSTRDSGVPDRFSGSGSGTDFTLTINSLQAEDVAVYYCQQYYRTPWTFGQGTK | |
| | | VEIKR | |
| iPS:361344 | 12H11.004 | DIVMTQSPDSLSVSLGERATINCKSSQSVLSSSNNKNYLAWYQQKPGQPPNLLIY | 113 |
| | | WTSTRDSGVPDRFSGSGSGTDFTLTINSLQAEDVAVYYCQQYYRTPWTFGQGTK | |
| | | VEIKR | |
| iPS:361351 | 12H11.005 | DIVMTQSPDSLSVSLGERATINCKSSQSVLSSSNNKNYLAWYQQKPGQPPNLLIY | 114 |
| | | WTSTRDSGVPDRFSGSGSGTDFTLTINSLQAEDVAVYYCQQYYRTPWTFGQGTK | |
| | | VEIKR | |
| iPS:361358 | 12H11.006 | DIVMTQSPDSLSVSLGERATINCKSSQSVLSSSNNKNYLAWYQQKPGQPPNLLIY | 115 |
| | | WTSTRDSGVPDRFSGSGSGTDFTLTINSLQAEDVAVYYCQQYYRTPWTFGQGTK | |
| | | VEIKR | |
| iPS:361365 | 12H11.007 | DIVMTQSPDSLSVSLGERATINCKSSQSVLSSSNNKNYLAWYQQKPGQPPNLLIY | 116 |
| | | WTSTRDSGVPDRFSGSGSGTDFTLTINSLQAEDVAVYYCQQYYRTPWTFGQGTK | |
| | | VEIKR | |
| iPS:361372 | 12H11.008 | DIVMTQSPDSLSVSLGERATINCKSSQSVLSSSNNKNYLAWYQQKPGQPPNLLIY | 117 |
| | | WTSTRDSGVPDRFSGSGSGTDFTLTINSLQAEDVAVYYCQQYYRTPWTFGQGTK | |
| | | VEIKR | |
| iPS:361379 | 12H11.009 | DIVMTQSPDSLSVSLGERATINCKSSQSVLSSSNNKNYLAWYQQKPGQPPNLLIY | 118 |
| | | WTSTRESGVPDRFSGSGSGTDFTLTINSLQAEDVAVYYCQQYYRTPWTFGQGTKV | |
| | | EIKR | |
| iPS:361383 | 12H11.010 | DIVMTQSPDSLSVSLGERATINCKSSQSVLSSSNNKNYLAWYQQKPGQPPNLLIY | 119 |
| | | WTSTRESGVPDRFSGSGSGTDFTLTINSLQAEDVAVYYCQQYYRTPWTFGQGTKV | |
| | | EIKR | |
| iPS:361387 | 12H11.011 | DIVMTQSPDSLSVSLGERATINCKSSQSVLSSSNNKNYLAWYQQKPGQPPNLLIY | 120 |
| | | WTSTRESGVPDRFSGSGSGTDFTLTINSLQAEDVAVYYCQQYYRTPWTFGQGTKV | |
| | | EIKR | |
| iPS:361391 | 12H11.012 | DIVMTQSPDSLSVSLGERATINCKSSQSVLSSSNNKNYLAWYQQKPGQPPNLLIY | 121 |
| | | WTSTRESGVPDRFSGSGSGTDFTLTINSLQAEDVAVYYCQQYYRTPWTFGQGTKV | |
| | | EIKR | |
| iPS:361395 | 12H11.013 | DIVMTQSPDSLAVSLGERATINCKSSQSVLSSSNNKNYLAWYQQKPGQPPKLLIY | 122 |
| | | WTSTRDSGVPDRFSGSGSGTDFTLTINSLQAEDVAVYYCQQYYRTPWTFGQGTK | |
| | | VEIKR | |
| iPS:361402 | 12H11.014 | DIVMTQSPDSLAVSLGERATINCKSSQSVLSSSNNKNYLAWYQQKPGQPPKLLIY | 123 |
| | | WTSTRESGVPDRFSGSGSGTDFTLTINSLQAEDVAVYYCQQYYRTPWTFGQGTKV | |
| | | EIKR | |
| iPS:361406 | 2C2.005.001 | QSVLTQPPSASGTPGQRVTISCSGSSSNIGSQTVNWYQHLPGTAPKLLIYTNNQRPS | 124 |
| | | GVPDRFSGSKSGTSASLAISGLQSEDEADYFCATFDESLSGPVFGGGTKLTVLG | |
| iPS:361412 | 2C2.005.002 | QSVLTQPPSASGTPGQRVTISCSGSSSNIGSQTVNWYQHLPGTAPKLLIYTNNQRPS | 125 |
| | | GVPDRFSGSKSGTSASLAISGLQSEDEADYFCATFDESLQGPVFGGGTKLTVLG | |
| iPS:361418 | 2C2.005.003 | QSVLTQPPSASGTPGQRVTISCSGSSSNIGSNYVNWYQHLPGTAPKLLIYTNNQRPS | 126 |
| | | GVPDRFSGSKSGTSASLAISGLQSEDEADYFCATFDESLSGPVFGGGTKLTVLG | |
| iPS:361424 | 2C2.005.004 | QSVLTQPPSASGTPGQRVTISCSGSSSNIGSNYVNWYQHLPGTAPKLLIYTNNQRPS | 127 |
| | | GVPDRFSGSKSGTSASLAISGLQSEDEADYFCATFDESLQGPVFGGGTKLTVLG | |
| iPS:361430 | 2C2.005.005 | QSVLTQPPSASGTPGQRVTISCSGSSSNIGSQTVNWYQHLPGTAPKLLIYTNNQRPS | 128 |
| | | GVPDRFSGSKSGTSASLAISGLQSEDEADYFCATFDDSLNGPVFGGGTKLTVLG | |
| iPS:361436 | 2C2.005.006 | QSVLTQPPSASGTPGQRVTISCSGSSSNIGSNYVNWYQHLPGTAPKLLIYTNNQRPS | 129 |
| | | GVPDRFSGSKSGTSASLAISGLQSEDEADYFCATFDDSLNGPVFGGGTKLTVLG | |
| iPS:361442 | 2C2.005.007 | QSVLTQPPSASGTPGQRVTISCSGSSSNIGSNTVNWYQHLPGTAPKLLIYTNNQRPS | 130 |
| | | GVPDRFSGSKSGTSASLAISGLQSEDEADYFCATFDESLNGPVFGGGTKLTVLG | |
| iPS:361448 | 2C2.005.008 | QSVLTQPPSASGTPGQRVTISCSGSSSNIGSNTVNWYQHLPGTAPKLLIYTNNQRPS | 131 |
| | | GVPDRFSGSKSGTSASLAISGLQSEDEADYFCATFDDSLQGPVFGGGTKLTVLG | |
| iPS:361454 | 2C2.005.009 | QSVLTQPPSASGTPGQRVTISCSGSSSNIGSNTVNWYQHLPGTAPKLLIYTNNQRPS | 132 |
| | | GVPDRFSGSKSGTSASLAISGLQSEDEADYFCATFDDSLSGPVFGGGTKLTVLG | |
| iPS:361460 | 2C2.005.010 | QSVLTQPPSASGTPGQRVTISCSGSSSNIGSNTVNWYQHLPGTAPKLLIYTNNQRPS | 133 |
| | | GVPDRFSGSKSGTSASLAISGLQSEDEADYFCATFDDSLNAPVFGGGTKLTVLG | |
| iPS:361466 | 2C2.005.011 | QSVLTQPPSASGTPGQRVTISCSGSSSNIGSNTVNWYQHLPGTAPKLLIYTNNQRPS | 134 |
| | | GVPDRFSGSKSGTSASLAISGLQSEDEADYFCATFDSSLNGPVFGGGTKLTVLG | |
| iPS:361472 | 2C2.005.012 | QSVLTQPPSASGTPGQRVTISCSGSSSNIGSNYVNWYQHLPGTAPKLLIYTNNQRPS | 135 |
| | | GVPDRFSGSKSGTSASLAISGLQSEDEADYFCATFDSSLNAPVFGGGTKLTVLG | |
| iPS:361478 | 2C2.005.013 | QSVLTQPPSASGTPGQRVTISCSGSSSNIGSNYVNWYQHLPGTAPKLLIYTNNQRPS | 136 |
| | | GVPDRFSGSKSGTSASLAISGLQSEDEADYFCATFDSSLNAPVFGGGTKLTVLG | |
| iPS:361485 | 2C2.005.014 | QSVLTQPPSASGTPGQRVTISCSGSSSNIGSQTVNWYQHLPGTAPKLLIYTNNQRPS | 137 |
| | | GVPDRFSGSKSGTSASLAISGLQSEDEADYFCATFDESLSGPVFGGGTKLTVLG | |
| iPS:361845 | 18F2.013 | DIQMTQSPSSLSASIGDRVTITCRASQDLRNYLGWYQQKPGKAPKRLIYGASSLQS | 138 |
| | | GVPSRFSGSGSGTEFTLTISSLQPEDFATYYCLQHNNYPFTFGQGTKVDIKR | |
| iPS:361851 | 6H1.009 | DIQMTQSPSSLSASIGDRVTITCRASQDIRDYLGWYQQKPGKAPKRLIYGASSLQS | 139 |
| | | GVPSRFSGSGSGTEFTLTISSLQPEDFATYYCLQHNNYPFTFGQGTKVDIKR | |
| iPS:361855 | 2C2.005.015 | QSVLTQPPSASGTPGQRVTISCSGSSSNIGSNTVNWYQQLPGTAPKLLIYTNNQRPS | 140 |
| | | GVPDRFSGSKSGTSASLAISGLQSEDEADYFCATFDSSLSGPVFGGGTKLTVLG | |
| iPS:336067 | 5G12.006 | DIQLTQSPSSLSASVGDRVTITCRASQTISRFLNWYQQKPGKAPELLIYVASSLQSG | 141 |
| | | VPSRFSGSGSGTDFTLTISSLQPEDFATYYCQQSYSTLISFGQGTKLEITR | |
| iPS:336169 | 17B11.002 | QSVLTQPPSVSAAPGQKVTISCSGSSSNIGNNYVSWYEQFPGTAPKLLIYDNNKRP | 142 |
| | | SGIPDRFSGSKSGTSATLGITGLQTGDEADYYCGTWDSSLSAVVFGGGTKLTVLG | |
| iPS:361127 | 5G12.006.001 | DIQLTQSPSSLSASVGDRVTITCRASQTISRFLNWYQQKPGKAPELLIYVASSLQSG | 143 |
| | | VPSRFSGSGSGTDFTLTISSLQPEDFATYYCQQSYSTLISFGQGTKLEIKR | |
| iPS:361136 | 5G12.006.002 | DIQLTQSPSSLSASVGDRVTITCRASQTISRFLNWYQQKPGKAPELLIYVASSLQSG | 144 |
| | | VPSRFSGSGSGTDFTLTISSLQPEDFATYYCQQSYSTLISFGQGTKLEIKR | |
| iPS:361140 | 5G12.006.003 | DIQLTQSPSSLSASVGDRVTITCRASQTISRFLNWYQQKPGKAPELLIYVASSLQSG | 145 |
| | | VPSRFSGSGSGTDFTLTISSLQPEDFATYYCQQSYSTLISFGQGTKLEITR | |
| iPS:359919 | 5G12.006.004 | DIQLTQSPSSLSASVGDRVTITCRASQTISRFLNWYQQKPGKAPKLLIYVASSLQSG | 146 |
| | | VPSRFSGSGSGTDFTLTISSLQPEDFATYYCQQSYSTLISFGQGTKLEIKR | |
| iPS:361144 | 5G12.006.005 | DIQLTQSPSSLSASVGDRVTITCRASQTISRFLNWYQQKPGKAPELLIYVASSLQSG | 147 |
| | | VPSRFSGSGSGTDFTLTISSLQPEDFATYYCQQSYSTLISFGQGTKLEIKR | |
| iPS:361151 | 5G12.006.006 | DIQLTQSPSSLSASVGDRVTITCRASQTISRFLNWYQQKPGKAPELLIYVASSLQSG | 148 |
| | | VPSRFSGSGSGTDFTLTISSLQPEDFATYYCQQSYSTLISFGQGTKLEIKR | |
| iPS:361491 | 17B11.002.001 | QSVLTQPPSVSAAPGQKVTISCSGSSSNIGNNYVSWYQQLPGTAPKLLIYDNNKRP | 149 |
| | | SGIPDRFSGSKSGTSATLGITGLQTGDEADYYCGTWDSSLSAVVFGGGTKLTVLG | |
| iPS:361499 | 17B11.002.002 | QSVLTQPPSVSAAPGQKVTISCSGSSSNIGNNYVSWYQQLPGTAPKLLIYDNNKRP | 150 |
| | | SGIPDRFSGSKSGTSATLGITGLQTGDEADYYCGTWDSSLSAVVFGGGTKLTVLG | |
| iPS:361503 | 17B11.002.003 | QSVLTQPPSVSAAPGQKVTISCSGSSSNIGNNYVSWYEQFPGTAPKLLIYDNNKRP | 151 |
| | | SGIPDRFSGSKSGTSATLGITGLQTGDEADYYCGTWDSSLSAVVFGGGTKLTVLG | |
| iPS:361507 | 17B11.002.004 | QSVLTQPPSVSAAPGQKVTISCSGSSSNIGNNYVSWYQQLPGTAPKLLIYDNNKRP | 152 |
| | | SGIPDRFSGSKSGTSATLAITGLQTGDEADYYCGTFESSLSAVVFGGGTKLTVLG | |
| iPS:361514 | 17B11.002.005 | QSVLTQPPSVSAAPGQKVTISCSGSSSNIGNNYVSWYQQLPGTAPKLLIYDNNKRP | 153 |
| | | SGIPDRFSGSKSGTSATLAITGLQTGDEADYYCGTWDSSLSAVVFGGGTKLTVLG | |
| iPS:360582 | 17B11.002.006 | QSVLTQPPSVSAAPGQKVTISCSGSSSNIGNNYVSWYQQLPGTAPKLLIYDNNKRP | 154 |
| | | SGIPDRFSGSKSGTSATLAITGLQTGDEADYYCGTWDSSLSAVVFGGGTKLTVLG | |
| iPS:361518 | 17B11.002.007 | QSVLTQPPSVSAAPGQKVTISCSGSSSNIGNNYVSWYQQLPGTAPKLLIYDNNKRP | 155 |
| | | SGIPDRFSGSKSGTSATLGITGLQTGDEADYYCGTWDSSLSAVVFGGGTKLTVLG | |
| iPS:360570 | 17B11.002.008 | QSVLTQPPSVSAAPGQKVTISCSGSSSNIGNNYVSWYQQLPGTAPKLLIYDNNKRP | 156 |
| | | SGIPDRFSGSKSGTSATLAITGLQTGDEADYYCGTFESSLSAVVFGGGTKLTVLG | |
| iPS:362051 | 5G12.005.001 | DIQLTQSPSSLSASVGDRVTITCRASQTISRFLNWYQQKPGKAPKLLIYVASSLQSG | 157 |
| | | VPSRFSGSGSGTDFTLTISSLQPEDFATYYCQQSYSTLLSFGQGTKLEIKR | |

TABLE 11
Variable Heavy (VH) Region Amino Acid Sequences of Example Anti-GIPR Antibodies

| | | | SEQ |
|---|---|---|---|
| | | | ID |
| Identifier | Construct | VH | NO: |
| iPS:336175 | 2C2.005 | QMQVVQSGAEVKKPGASVKVSCKASGYTFTGYYMHWVRQAPGQGLEWMGWIN | 158 |
| | | PNSGGTNYAQKFQGRVTMTRDTSISTAYMELSRLRSDDTAVYYCARGGDYVWGT | |
| | | YRPHYYYGMDVWGQGTTVTVSS | |
| iPS:335914 | 4B1 | QVQLVESGGGVVQPGRSLRLSCAASGFTFSNFGMHWVRQAPGKGLEWVAVIWY | 159 |
| | | DGSNENYADSVKGRFTISRDNSKNTLYLHMNSLRVADTAVYYCARDGTIFGVVL | |
| | | GDYWGQGTLVTVSS | |
| iPS:335938 | 6H1 | QVQLVESGGGVVQPGRSLRLSCAASGFTFSYFGMHWVRQAPGKGLEWVAVIWY | 160 |
| | | DGSNKYYADSVKGRFTISRDNSKNTLYLQMNSLRAEDTAVYYCARDGTIFGVLLG | |
| | | DYWGQGTLVTVSS | |
| iPS:335941 | 2F11 | QVQLVESGGGVVQPGRSLRLSCAASGFTFSSYGMHWVRQAPGKGLEWVAVIWY | 161 |
| | | DGSNKYYADSVKGRFTISSDNSKNTLYLQMNSLRAEDTAVYYCARDRTIFGVVLD | |
| | | YWGQGTLVTVSS | |
| iPS:335970 | 5C2 | QVPLVQSGAEVKKPGASVKVSCKASGYTFTGYYIHWVRQAPGQGLEWMGWINP | 162 |
| | | DSGGTDYSQRFQGRFTMTRDTSISTAYMELNRLRSDDTAVYYCAREATIFGMVIV | |
| | | PFDYWGQGTLVTVSS | |
| iPS:335978 | 13H12 | QVPLVQSGAEVKKPGASVKVSCKASGYTFTGYYIHWVRQAPGQGLEWMGWINP | 163 |
| | | DSGGTDYSQRFQGRFTMTRDTSISTAYMELSRLRSDDTAVYYCAREATIFGMVIVP | |
| | | FDYWGQGTLVTVSS | |
| iPS:335986 | 11C1 | QVPLVQSGAEVKKPGASVKVSCKASGYTFTGYYIHWVRQAPGQGLVWMGWISP | 164 |
| | | NSGDTSYAQKFQDRVTMTRDTSISTAYMELSRLRSDDTAVYFCTREATIFGMLIVP | |
| | | FDYWGQGTLVTVSS | |
| iPS:335994 | 12H11 | QVPLVQSGAEVKKPGASVKVSCKASGYTFTGYYIHWVRQAPGQGLEWMGWISPN | 165 |
| | | NGDTNYAQKFQDRVTMTRDTSISTAYMELSRLRSDDTAVYYCTREATIFGMLIVP | |
| | | FDYWGQGTLVTVSS | |
| iPS:336024 | 18E3 | QVQLQESGPGLVKPSQTLSLTCTVSGDSISSGGYYWSWIRQHPGKGLEWIGYIYYS | 166 |
| | | GSTYYNPSLKSRVTISVDTSKNQFSLKLSSVTAADTAVYYCARDRITIFGVVMGGG | |
| | | MDVWGQGTTVTVSS | |
| iPS:336041 | 2G10_LC1 | QVQLVESGGGVVQPGRSLRLSCAASGFTFSNYGMHWVRQAPGEGLEWVAAIWF | 167 |
| | | DGSDKYYADSVKGRFTISRDNSKNTLYLQMNSLRAEDTAVYYCARDQAIFGVVP | |
| | | DYWGQGTLVTVSS | |
| iPS:336077 | 4H9.004 | QVQLVESGGGVVQPGRSLRLSCAASGFTFSYFGMHWVRQAPGKGLEWVAVIWY | 168 |
| | | DGSNKYYADSVKGRFTISRDNSKNTLYLQMNSLRAEDTAVYYCARDGTIFGVLLG | |
| | | DYWGQGTLVTVSS | |
| iPS:336088 | 6A5.004 | QVQLVESGGGVVQPGRSLRLSCAASGFSFSSYGMHWVRQPPGKGLEWVAAIWYD | 169 |
| | | GNNKYYADSVKGRFTISRDSSKNTLYLQMNSLRAEDTAVYYCARDRTIFGVVLEY | |
| | | LGQGTLVTVSS | |
| iPS:336099 | 17H11.004 | QVQLQESGPGLVKPSETLSLTCTVSQGSISSYYWSWIRQPAGKGLEWIGRIYTSGST | 170 |
| | | NYNPSLKSRVTMSIDTSKNQFSLKLNSVTAADTAVYYCARDVAVAGFDYWGQGT | |
| | | LVTVSS | |
| iPS:359621 | 17H11.004.001 | QVQLQESGPGLVKPSETLSLTCTVSGGSISSYYWSWIRQPAGKGLEWIGRIYTSGST | 171 |
| | | NYNPSLKSRVTMSIDTSKNQFSLKLNSVTAADTAVYYCARDVAVAGFDYWGQGT | |
| | | LVTVSS | |
| iPS:359781 | 4H9.004.001 | QVQLVESGGGVVQPGRSLRLSCAASGFTFSYFGMHWVRQAPGKGLEWVAVIWY | 172 |
| | | DASNKYYADAVKGRFTISRDNSKNTLYLQMNSLRAEDTAVYYCARDGTIFGVLL | |
| | | GDYWGQGTLVTVSS | |
| iPS:360929 | 4H9.004.002 | QVQLVESGGGVVQPGRSLRLSCAASGFTFSYFGMHWVRQAPGKGLEWVAVIWY | 173 |
| | | DASNKYYADSVKGRFTISRDNSKNTLYLQMNSLRAEDTAVYYCARDGTIFGVLLG | |
| | | DYWGQGTLVTVSS | |
| iPS:360936 | 4H9.004.003 | QVQLVESGGGVVQPGRSLRLSCAASGFTFSYFGMHWVRQAPGKGLEWVAVIWY | 174 |
| | | DGSNKYYADAVKGRFTISRDNSKNTLYLQMNSLRAEDTAVYYCARDGTIFGVLL | |
| | | GDYWGQGTLVTVSS | |
| iPS:360943 | 4H9.004.004 | QVQLVESGGGVVQPGRSLRLSCAASGFTFSYFGMHWVRQAPGKGLEWVAVIWY | 175 |
| | | DASNKYYADAVKGRFTISRDNSKNTLYLQMNSLRAEDTAVYYCARDGTIFGVLL | |
| | | GDYWGQGTLVTVSS | |
| iPS:360949 | 4H9.004.005 | QVQLVESGGGVVQPGRSLRLSCAASGFTFSYFGMHWVRQAPGKGLEWVAVIWY | 176 |
| | | DASNKYYADAVKGRFTISRDNSKNTLYLQMNSLRAEDTAVYYCARDGTIFGVLL | |
| | | GDYWGQGTLVTVSS | |
| iPS:359761 | 4H9.004.006 | QVQLVESGGGVVQPGRSLRLSCAASGFTFSYFGMHWVRQAPGKGLEWVAVIWY | 177 |
| | | DASNKYYADAVKGRFTISRDNSKNTLYLQMNSLRAEDTAVYYCARDRTIFGVLL | |
| | | GDYWGQGTLVTVSS | |
| iPS:360955 | 4B1.010 | QVQLVESGGGVVQPGRSLRLSCAASGFTFSNFGMHWVRQAPGKGLEWVAVIWY | 178 |
| | | DASNENYADAVKGRFTISRDNSKNTLYLQMNSLRVADTAVYYCARDGTIFGVVL | |
| | | GDYWGQGTLVTVSS | |
| iPS:360962 | 4B1.011 | QVQLVESGGGVVQPGRSLRLSCAASGFTFSNFGMHWVRQAPGKGLEWVAVIWY | 179 |
| | | DASNENYADAVKGRFTISRDNSKNTLYLQMNSLRVADTAVYYCARDGTIFGVVL | |
| | | GDYWGQGTLVTVSS | |
| iPS:360968 | 4B1.012 | QVQLVESGGGVVQPGRSLRLSCAASGFTFSNFGMHWVRQAPGKGLEWVAVIWY | 180 |
| | | DASNENYADAVKGRFTISRDNSKNTLYLQMNSLRVADTAVYYCARDGTIFGVVL | |
| | | GDYWGQGTLVTVSS | |
| iPS:360974 | 4B1.013 | QVQLVESGGGVVQPGRSLRLSCAASGFTFSNFGMHWVRQAPGKGLEWVAVIWY | 181 |
| | | DASNENYADSVKGRFTISRDNSKNTLYLHMNSLRVADTAVYYCARDGTIFGVVL | |
| | | GDYWGQGTLVTVSS | |
| iPS:360978 | 4B1.014 | QVQLVESGGGVVQPGRSLRLSCAASGFTFSNFGMHWVRQAPGKGLEWVAVIWY | 182 |
| | | DGSNENYADAVKGRFTISRDNSKNTLYLHMNSLRVADTAVYYCARDGTIFGVVL | |
| | | GDYWGQGTLVTVSS | |
| iPS:359785 | 4B1.015 | QVQLVESGGGVVQPGRSLRLSCAASGFTFSNFGMHWVRQAPGKGLEWVAVIWY | 183 |
| | | DASNENYADAVKGRFTISRDNSKNTLYLQMNSLRVEDTAVYYCARDRTIFGVVL | |
| | | GDYWGQGTLVTVSS | |
| iPS:360982 | 4B1.016 | QVQLVESGGGVVQPGRSLRLSCAASGFTFSNFGMHWVRQAPGKGLEWVAVIWY | 184 |
| | | DASNENYADAVKGRFTISRDNSKNTLYLQMNSLRVEDTAVYYCARDGTIFGVVL | |
| | | GDYWGQGTLVTVSS | |
| iPS:335922 | 18F2 | QVQLVESGGGVVQPGRSLRLSCAASGFTFSNFGMHWVRQAPGKGLEWVAVIWY | 185 |
| | | DGSNENYADSVKGRFTISRDNSKNTLYLHMNSLRAADTAVYYCARDGTIFGVVL | |
| | | GDYWGQGTLVTVSS | |
| iPS:360986 | 18F2.002 | QVQLVESGGGVVQPGRSLRLSCAASGFTFSNFGMHWVRQAPGKGLEWVAVIWY | 186 |
| | | DASNENYADAVKGRFTISRDNSKNTLYLQMNSLRAADTAVYYCARDGTIFGVVL | |
| | | GDYWGQGTLVTVSS | |
| iPS:360995 | 18F2.003 | QVQLVESGGGVVQPGRSLRLSCAASGFTFSNFGMHWVRQAPGKGLEWVAVIWY | 187 |
| | | DASNENYADAVKGRFTISRDNSKNTLYLHMNSLRAADTAVYYCARDGTIFGVVL | |
| | | GDYWGQGTLVTVSS | |
| iPS:360999 | 18F2.004 | QVQLVESGGGVVQPGRSLRLSCAASGFTFSNFGMHWVRQAPGKGLEWVAVIWY | 188 |
| | | DASNENYADAVKGRFTISRDNSKNTLYLQMNSLRAADTAVYYCARDGTIFGVVL | |
| | | GDYWGQGTLVTVSS | |
| iPS:361005 | 18F2.005 | QVQLVESGGGVVQPGRSLRLSCAASGFTFSNFGMHWVRQAPGKGLEWVAVIWY | 189 |
| | | DASNENYADAVKGRFTISRDNSKNTLYLQMNSLRAADTAVYYCARDGTIFGVVL | |
| | | GDYWGQGTLVTVSS | |
| iPS:361009 | 18F2.006 | QVQLVESGGGVVQPGRSLRLSCAASGFTFSNFGMHWVRQAPGKGLEWVAVIWY | 190 |
| | | DASNENYADAVKGRFTISRDNSKNTLYLHMNSLRAADTAVYYCARDGTIFGVVL | |
| | | GDYWGQGTLVTVSS | |
| iPS:361013 | 18F2.007 | QVQLVESGGGVVQPGRSLRLSCAASGFTFSNFGMHWVRQAPGKGLEWVAVIWY | 191 |
| | | DASNENYADAVKGRFTISRDNSKNTLYLHMNSLRAADTAVYYCARDGTIFGVVL | |
| | | GDYWGQGTLVTVSS | |
| iPS:361017 | 18F2.008 | QVQLVESGGGVVQPGRSLRLSCAASGFTFSNFGMHWVRQAPGKGLEWVAVIWY | 192 |
| | | DASNENYADAVKGRFTISRDNSKNTLYLQMNSLRAADTAVYYCARDGTIFGVVL | |
| | | GDYWGQGTLVTVSS | |
| iPS:361021 | 18F2.009 | QVQLVESGGGVVQPGRSLRLSCAASGFTFSNFGMHWVRQAPGKGLEWVAVIWY | 193 |
| | | DGSNENYADAVKGRFTISRDNSKNTLYLQMNSLRAADTAVYYCARDGTIFGVVL | |
| | | GDYWGQGTLVTVSS | |
| iPS:361028 | 18F2.010 | QVQLVESGGGVVQPGRSLRLSCAASGFTFSNFGMHWVRQAPGKGLEWVAVIWY | 194 |
| | | DASNENYADSVKGRFTISRDNSKNTLYLQMNSLRAADTAVYYCARDGTIFGVVL | |
| | | GDYWGQGTLVTVSS | |
| iPS:360535 | 18F2.011 | QVQLVESGGGVVQPGRSLRLSCAASGFTFSNFGMHWVRQAPGKGLEWVAVIWY | 195 |
| | | DASNENYADAVKGRFTISRDNSKNTLYLQMNSLRAEDTAVYYCARDRTIFGVVL | |
| | | GDYWGQGTLVTVSS | |
| iPS:361035 | 18F2.012 | QVQLVESGGGVVQPGRSLRLSCAASGFTFSNFGMHWVRQAPGKGLEWVAVIWY | 196 |
| | | DASNENYADAVKGRFTISRDNSKNTLYLQMNSLRAEDTAVYYCARDGTIFGVVL | |
| | | GDYWGQGTLVTVSS | |
| iPS:359940 | 2F11.002 | QVQLVESGGGVVQPGRSLRLSCAASGFTFSSYGMHWVRQAPGKGLEWVAVIWY | 197 |
| | | DASNKYYADAVKGRFTISRDNSKNTLYLQMNSLRAEDTAVYYCARDRTIFGVVL | |
| | | DYWGQGTLVTVSS | |
| iPS:361039 | 2F11.003 | QVQLVESGGGVVQPGRSLRLSCAASGFTFSSYGMHWVRQAPGKGLEWVAVIWY | 198 |
| | | DASNKYYADAVKGRFTISSDNSKNTLYLQMNSLRAEDTAVYYCARDRTIFGVVL | |
| | | DYWGQGTLVTVSS | |
| iPS:361043 | 2F11.004 | QVQLVESGGGVVQPGRSLRLSCAASGFTFSSYGMHWVRQAPGKGLEWVAVIWY | 199 |
| | | DASNKYYADAVKGRFTISRDNSKNTLYLQMNSLRAEDTAVYYCARDRTIFGVVL | |
| | | DYWGQGTLVTVSS | |
| iPS:361049 | 2F11.005 | QVQLVESGGGVVQPGRSLRLSCAASGFTFSSYGMHWVRQAPGKGLEWVAVIWY | 200 |
| | | DASNKYYADAVKGRFTISRDNSKNTLYLQMNSLRAEDTAVYYCARDRTIFGVVL | |
| | | DYWGQGTLVTVSS | |
| iPS:361055 | 2F11.006 | QVQLVESGGGVVQPGRSLRLSCAASGFTFSSYGMHWVRQAPGKGLEWVAVIWY | 201 |
| | | DASNKYYADAVKGRFTISSDNSKNTLYLQMNSLRAEDTAVYYCARDRTIFGVVL | |
| | | DYWGQGTLVTVSS | |
| iPS:361059 | 2F11.007 | QVQLVESGGGVVQPGRSLRLSCAASGFTFSSYGMHWVRQAPGKGLEWVAVIWY | 202 |
| | | DASNKYYADAVKGRFTISSDNSKNTLYLQMNSLRAEDTAVYYCARDRTIFGVVL | |
| | | DYWGQGTLVTVSS | |
| iPS:361063 | 2F11.008 | QVQLVESGGGVVQPGRSLRLSCAASGFTFSSYGMHWVRQAPGKGLEWVAVIWY | 203 |
| | | DASNKYYADAVKGRFTISRDNSKNTLYLQMNSLRAEDTAVYYCARDRTIFGVVL | |
| | | DYWGQGTLVTVSS | |
| iPS:359949 | 2F11.009 | QVQLVESGGGVVQPGRSLRLSCAASGFTFSSYGMHWVRQAPGKGLEWVAVIWY | 204 |
| | | DASNKYYADSVKGRFTISRDNSKNTLYLQMNSLRAEDTAVYYCARDRTIFGVVLD | |
| | | YWGQGTLVTVSS | |
| iPS:359956 | 2F11.010 | QVQLVESGGGVVQPGRSLRLSCAASGFTFSSYGMHWVRQAPGKGLEWVAVIWY | 205 |
| | | DGSNKYYADAVKGRFTISRDNSKNTLYLQMNSLRAEDTAVYYCARDRTIFGVVL | |
| | | DYWGQGTLVTVSS | |
| iPS:359865 | 6H1.002 | QVQLVESGGGVVQPGRSLRLSCAASGFTFSYFGMHWVRQAPGKGLEWVAVIWY | 206 |
| | | DASNKYYADAVKGRFTISRDNSKNTLYLQMNSLRAEDTAVYYCARDGTIFGVLL | |
| | | GDYWGQGTLVTVSS | |
| iPS:359869 | 6H1.003 | QVQLVESGGGVVQPGRSLRLSCAASGFTFSYFGMHWVRQAPGKGLEWVAVIWY | 207 |
| | | DASNKYYADAVKGRFTISRDNSKNTLYLQMNSLRAEDTAVYYCARDRTIFGVLL | |
| | | GDYWGQGTLVTVSS | |
| iPS:359873 | 6H1.004 | QVQLVESGGGVVQPGRSLRLSCAASGFTFSYFGMHWVRQAPGKGLEWVAVIWY | 208 |
| | | DASNKYYADAVKGRFTISRDNSKNTLYLQMNSLRAEDTAVYYCARDGTIFGVLL | |
| | | GDYWGQGTLVTVSS | |
| iPS:359877 | 6H1.005 | QVQLVESGGGVVQPGRSLRLSCAASGFTFSYFGMHWVRQAPGKGLEWVAVIWY | 209 |
| | | DASNKYYADAVKGRFTISRDNSKNTLYLQMNSLRAEDTAVYYCARDRTIFGVLL | |
| | | GDYWGQGTLVTVSS | |
| iPS:361067 | 6H1.006 | QVQLVESGGGVVQPGRSLRLSCAASGFTFSYFGMHWVRQAPGKGLEWVAVIWY | 210 |
| | | DGSNKYYADSVKGRFTISRDNSKNTLYLQMNSLRAEDTAVYYCARDGTIFGVLLG | |
| | | DYWGQGTLVTVSS | |
| iPS:361071 | 6H1.007 | QVQLVESGGGVVQPGRSLRLSCAASGFTFSYFGMHWVRQAPGKGLEWVAVIWY | 211 |
| | | DASNKYYADSVKGRFTISRDNSKNTLYLQMNSLRAEDTAVYYCARDGTIFGVLLG | |
| | | DYWGQGTLVTVSS | |
| iPS:361075 | 6H1.008 | QVQLVESGGGVVQPGRSLRLSCAASGFTFSYFGMHWVRQAPGKGLEWVAVIWY | 212 |
| | | DGSNKYYADAVKGRFTISRDNSKNTLYLQMNSLRAEDTAVYYCARDGTIFGVLL | |
| | | GDYWGQGTLVTVSS | |
| iPS:361079 | 6A5.004.001 | QVQLVESGGGVVQPGRSLRLSCAASGFSFSSYGMHWVRQPPGKGLEWVAAIWYD | 213 |
| | | ANNKYYADAVKGRFTISRDSSKNTLYLQMNSLRAEDTAVYYCARDRTIFGVVLE | |
| | | YWGQGTLVTVSS | |
| iPS:361085 | 6A5.004.002 | QVQLVESGGGVVQPGRSLRLSCAASGFSFSSYGMHWVRQPPGKGLEWVAAIWYD | 214 |
| | | ANNKYYADAVKGRFTISRDSSKNTLYLQMNSLRAEDTAVYYCARDRTIFGVVLE | |
| | | YWGQGTLVTVSS | |
| iPS:361091 | 6A5.004.003 | QVQLVESGGGVVQPGRSLRLSCAASGFSFSSYGMHWVRQPPGKGLEWVAAIWYD | 215 |
| | | ANNKYYADAVKGRFTISRDSSKNTLYLQMNSLRAEDTAVYYCARDRTIFGVVLE | |
| | | YLGQGTLVTVSS | |
| iPS:361095 | 6A5.004.004 | QVQLVESGGGVVQPGRSLRLSCAASGFSFSSYGMHWVRQPPGKGLEWVAAIWYD | 216 |
| | | ANNKYYADAVKGRFTISRDSSKNTLYLQMNSLRAEDTAVYYCARDRTIFGVVLE | |
| | | YWGQGTLVTVSS | |
| iPS:361101 | 6A5.004.005 | QVQLVESGGGVVQPGRSLRLSCAASGFSFSSYGMHWVRQPPGKGLEWVAAIWYD | 217 |
| | | ANNKYYADAVKGRFTISRDSSKNTLYLQMNSLRAEDTAVYYCARDRTIFGVVLE | |
| | | YLGQGTLVTVSS | |
| iPS:361105 | 6A5.004.006 | QVQLVESGGGVVQPGRSLRLSCAASGFSFSSYGMHWVRQPPGKGLEWVAAIWYD | 218 |
| | | ANNKYYADAVKGRFTISRDSSKNTLYLQMNSLRAEDTAVYYCARDRTIFGVVLE | |
| | | YLGQGTLVTVSS | |
| iPS:361109 | 6A5.004.007 | QVQLVESGGGVVQPGRSLRLSCAASGFSFSSYGMHWVRQPPGKGLEWVAAIWYD | 219 |
| | | ANNKYYADAVKGRFTISRDSSKNTLYLQMNSLRAEDTAVYYCARDRTIFGVVLE | |
| | | YWGQGTLVTVSS | |
| iPS:361113 | 6A5.004.008 | QVQLVESGGGVVQPGRSLRLSCAASGFSFSSYGMHWVRQPPGKGLEWVAAIWYD | 220 |
| | | GNNKYYADAVKGRFTISRDSSKNTLYLQMNSLRAEDTAVYYCARDRTIFGVVLE | |
| | | YWGQGTLVTVSS | |
| iPS:361120 | 6A5.004.009 | QVQLVESGGGVVQPGRSLRLSCAASGFSFSSYGMHWVRQPPGKGLEWVAAIWYD | 221 |
| | | ANNKYYADSVKGRFTISRDSSKNTLYLQMNSLRAEDTAVYYCARDRTIFGVVLEY | |
| | | WGQGTLVTVSS | |
| iPS:359896 | 6A5.004.010 | QVQLVESGGGVVQPGRSLRLSCAASGFSFSSYGMHWVRQPPGKGLEWVAAIWYD | 222 |
| | | ANNKYYADAVKGRFTISRDSSKNTLYLQMNSLRAEDTAVYYCARDRTIFGVVLE | |
| | | YWGQGTLVTVSS | |
| iPS:359890 | 6A5.004.011 | QVQLVESGGGVVQPGRSLRLSCAASGFSFSSYGMHWVRQPPGKGLEWVAAIWYD | 223 |
| | | ANNKYYADAVKGRFTISRDSSKNTLYLQMNSLRAEDTAVYYCARDRTIFGVVLE | |
| | | YLGQGTLVTVSS | |
| iPS:359567 | 2A11.002 | QVQLVESGGGVVQPGRSLRLSCAASGFSFSSYGMHWVRQAPGKGLEWVAVIWY | 224 |
| | | DASNKYYEDAVKGRFTISRDNSKNTLFLQVNSLRAEDTAVYYCARGITIFGHGFEY | |
| | | WGQGTLVTVSS | |
| iPS:335965 | 2A11.003 | QVQLVESGGGVVQPGRSLRLSCAASGFSFSSYGMHWVRQAPGKGLEWVAVIWY | 225 |
| | | DGSNKYYEDSVKGRFTISRDNSKNTLFLQVNSLRAEDTAVYYCARGITIFGHGFEY | |
| | | WGQGTLVTVSS | |
| iPS:361158 | 2A11.004 | QVQLVESGGGVVQPGRSLRLSCAASGFSFSSYGMHWVRQAPGKGLEWVAVIWY | 226 |
| | | DGSNKYYEDAVKGRFTISRDNSKNTLFLQVNSLRAEDTAVYYCARGITIFGHGFEY | |
| | | WGQGTLVTVSS | |
| iPS:361165 | 2A11.005 | QVQLVESGGGVVQPGRSLRLSCAASGFSFSSYGMHWVRQAPGKGLEWVAVIWY | 227 |
| | | DASNKYYEDSVKGRFTISRDNSKNTLFLQVNSLRAEDTAVYYCARGITIFGHGFEY | |
| | | WGQGTLVTVSS | |
| iPS:361172 | 2G10_LC1.003 | QVQLVESGGGVVQPGRSLRLSCAASGFTFSNYGMHWVRQAPGEGLEWVAAIWF | 228 |
| | | DASDKYYADAVKGRFTISRDNSKNTLYLQMNSLRAEDTAVYYCARDQAIFGVVP | |
| | | DYWGQGTLVTVSS | |
| iPS:361178 | 2G10_LC1.004 | QVQLVESGGGVVQPGRSLRLSCAASGFTFSNYGMHWVRQAPGEGLEWVAAIWF | 229 |
| | | DASDKYYADSVKGRFTISRDNSKNTLYLQMNSLRAEDTAVYYCARDQAIFGVVP | |
| | | DYWGQGTLVTVSS | |
| iPS:361185 | 2G10_LC1.005 | QVQLVESGGGVVQPGRSLRLSCAASGFTFSNYGMHWVRQAPGEGLEWVAAIWF | 230 |
| | | DGSDKYYADAVKGRFTISRDNSKNTLYLQMNSLRAEDTAVYYCARDQAIFGVVP | |
| | | DYWGQGTLVTVSS | |
| iPS:361192 | 2G10_LC1.006 | QVQLVESGGGVVQPGRSLRLSCAASGFTFSNYGMHWVRQAPGEGLEWVAAIWF | 231 |
| | | DASDKYYADAVKGRFTISRDNSKNTLYLQMNSLRAEDTAVYYCARDQAIFGVVP | |
| | | DYWGQGTLVTVSS | |
| iPS:359609 | 2G10_LC1.007 | QVQLVESGGGVVQPGRSLRLSCAASGFTFSNYGMHWVRQAPGKGLEWVAAIWF | 232 |
| | | DASDKYYADAVKGRFTISRDNSKNTLYLQMNSLRAEDTAVYYCARDQAIFGVVP | |
| | | DYWGQGTLVTVSS | |
| iPS:359615 | 2G10_LC1.008 | QVQLVESGGGVVQPGRSLRLSCAASGFTFSNYGMHWVRQAPGKGLEWVAAIWF | 233 |
| | | DASDKYYADAVKGRFTISRDNSKNTLYLQMNSLRAEDTAVYYCARDQAIFGVVP | |
| | | DYWGQGTLVTVSS | |
| iPS:361196 | 2G10_LC1.009 | QVQLVESGGGVVQPGRSLRLSCAASGFTFSNYGMHWVRQAPGEGLEWVAAIWF | 234 |
| | | DASDKYYADAVKGRFTISRDNSKNTLYLQMNSLRAEDTAVYYCARDQAIFGVVP | |
| | | DYWGQGTLVTVSS | |
| iPS:361202 | 2G10_LC1.010 | QVQLVESGGGVVQPGRSLRLSCAASGFTFSNYGMHWVRQAPGKGLEWVAAIWF | 235 |
| | | DASDKYYADAVKGRFTISRDNSKNTLYLQMNSLRAEDTAVYYCARDQAIFGVVP | |
| | | DYWGQGTLVTVSS | |
| iPS:359644 | 18E3.002 | QVQLQESGPGLVKPSETLSLTCTVSGDSISSGGYYWSWIRQPPGKGLEWIGYIYYS | 236 |
| | | GSTYYNPSLKSRVTISVDTSKNQFSLKLSSVTAADTAVYYCARDRITIFGVVMGGG | |
| | | MDVWGQGTTVTVSS | |
| iPS:361206 | 18E3.003 | QVQLQESGPGLVKPSETLSLTCTVSGDSISSGGYYWSWIRQPPGKGLEWIGYIYYS | 237 |
| | | GSTYYNPSLKSRVTISVDTSKNQFSLKLSSVTAADTAVYYCARDRITIFGVVMGGG | |
| | | MDVWGQGTTVTVSS | |
| iPS:359628 | 18E3.004 | QVQLQESGPGLVKPSQTLSLTCTVSGDSISSGGYYWSWIRQPPGKGLEWIGYIYYS | 238 |
| | | GSTYYNPSLKSRVTISVDTSKNQFSLKLSSVTAADTAVYYCARDRITIFGVVMGGG | |
| | | MDVWGQGTTVTVSS | |
| iPS:359637 | 18E3.005 | QVQLQESGPGLVKPSETLSLTCTVSGDSISSGGYYWSWIRQHPGKGLEWIGYIYYS | 239 |
| | | GSTYYNPSLKSRVTISVDTSKNQFSLKLSSVTAADTAVYYCARDRITIFGVVMGGG | |
| | | MDVWGQGTTVTVSS | |
| iPS:361210 | 18E3.006 | QVQLQESGPGLVKPSQTLSLTCTVSGDSISSGGYYWSWIRQHPGKGLEWIGYIYYS | 240 |
| | | GSTYYNPSLKSRVTISVDTSKNQFSLKLSSVTAADTAVYYCARDRITIFGVVMGGG | |
| | | MDVWGQGTTVTVSS | |
| iPS:361214 | 18E3.007 | QVQLQESGPGLVKPSETLSLTCTVSGDSISSGGYYWSWIRQHPGKGLEWIGYIYYS | 241 |
| | | GSTYYNPSLKSRVTISVDTSKNQFSLKLSSVTAADTAVYYCARDRITIFGVVMGGG | |
| | | MDVWGQGTTVTVSS | |
| iPS:361218 | 18E3.008 | QVQLQESGPGLVKPSQTLSLTCTVSGDSISSGGYYWSWIRQPPGKGLEWIGYIYYS | 242 |
| | | GSTYYNPSLKSRVTISVDTSKNQFSLKLSSVTAADTAVYYCARDRITIFGVVMGGG | |
| | | MDVWGQGTTVTVSS | |
| iPS:361222 | 5C2.006 | QVQLVQSGAEVKKPGASVKVSCKASGYTFTGYYIHWVRQAPGQGLEWMGWINP | 243 |
| | | ESGGTDYSQRFQGRVTMTRDTSISTAYMELNRLRSDDTAVYYCAREATIFGMVIV | |
| | | PFDYWGQGTLVTVSS | |
| iPS:361229 | 5C2.007 | QVPLVQSGAEVKKPGASVKVSCKASGYTFTGYYIHWVRQAPGQGLEWMGWINP | 244 |
| | | ESGGTDYSQRFQGRFTMTRDTSISTAYMELNRLRSDDTAVYYCAREATIFGMVIVP | |
| | | FDYWGQGTLVTVSS | |
| iPS:361236 | 5C2.008 | QVQLVQSGAEVKKPGASVKVSCKASGYTFTGYYIHWVRQAPGQGLEWMGWINP | 245 |
| | | DAGGTDYSQRFQGRVTMTRDTSISTAYMELNRLRSDDTAVYYCAREATIFGMVIV | |
| | | PFDYWGQGTLVTVSS | |
| iPS:359685 | 5C2.009 | QVPLVQSGAEVKKPGASVKVSCKASGYTFTGYYIHWVRQAPGQGLEWMGWINP | 246 |
| | | DAGGTDYSQRFQGRFTMTRDTSISTAYMELNRLRSDDTAVYYCAREATIFGMVIV | |
| | | PFDYWGQGTLVTVSS | |
| iPS:361240 | 5C2.010 | QVQLVQSGAEVKKPGASVKVSCKASGYTFTGYYIHWVRQAPGQGLEWMGWINP | 247 |
| | | DSGGTDYSQRFQGRVTMTRDTSISTAYMELNRLRSDDTAVYYCAREATIFGMVIV | |
| | | PFDYWGQGTLVTVSS | |
| iPS:361247 | 5C2.011 | QVQLVQSGAEVKKPGASVKVSCKASGYTFTGYYIHWVRQAPGQGLEWMGWINP | 248 |
| | | DSGGTDYSQRFQGRFTMTRDTSISTAYMELNRLRSDDTAVYYCAREATIFGMVIV | |
| | | PFDYWGQGTLVTVSS | |
| iPS:361254 | 5C2.012 | QVPLVQSGAEVKKPGASVKVSCKASGYTFTGYYIHWVRQAPGQGLEWMGWINP | 249 |
| | | DSGGTDYSQRFQGRVTMTRDTSISTAYMELNRLRSDDTAVYYCAREATIFGMVIV | |
| | | PFDYWGQGTLVTVSS | |
| iPS:361261 | 5C2.013 | QVQLVQSGAEVKKPGASVKVSCKASGYTFTGYYIHWVRQAPGQGLEWMGWINP | 250 |
| | | DAGGTDYSQRFQGRFTMTRDTSISTAYMELNRLRSDDTAVYYCAREATIFGMVIV | |
| | | PFDYWGQGTLVTVSS | |
| iPS:361268 | 5C2.014 | QVPLVQSGAEVKKPGASVKVSCKASGYTFTGYYIHWVRQAPGQGLEWMGWINP | 251 |
| | | DAGGTDYSQRFQGRVTMTRDTSISTAYMELNRLRSDDTAVYYCAREATIFGMVIV | |
| | | PFDYWGQGTLVTVSS | |
| iPS:359669 | 5C2.015 | QVQLVQSGAEVKKPGASVKVSCKASGYTFTGYYIHWVRQAPGQGLEWMGWINP | 252 |
| | | DAGGTDYSQRFQGRVTMTRDTSISTAYMELNSLRSDDTAVYYCAREATIFGMVIV | |
| | | PFDYWGQGTLVTVSS | |
| iPS:359678 | 5C2.016 | QVQLVQSGAEVKKPGASVKVSCKASGYTFTGYYIHWVRQAPGQGLEWMGWINP | 253 |
| | | ESGGTDYSQRFQGRVTMTRDTSISTAYMELNSLRSDDTAVYYCAREATIFGMVIVP | |
| | | FDYWGQGTLVTVSS | |
| iPS:361275 | 11C1.002 | QVPLVQSGAEVKKPGASVKVSCKASGYTFTGYYIHWVRQAPGQGLVWMGWISP | 254 |
| | | NSGETSYAQKFQDRVTMTRDTSISTAYMELSRLRSDDTAVYFCAREATIFGMLIVP | |
| | | FDYWGQGTLVTVSS | |
| iPS:361282 | 11C1.003 | QVPLVQSGAEVKKPGASVKVSCKASGYTFTGYYIHWVRQAPGQGLVWMGWISP | 255 |
| | | NSGDTSYAQKFQDRVTMTRDTSISTAYMELSRLRSDDTAVYFCAREATIFGMLIVP | |
| | | FDYWGQGTLVTVSS | |
| iPS:361289 | 11C1.004 | QVPLVQSGAEVKKPGASVKVSCKASGYTFTGYYIHWVRQAPGQGLVWMGWISP | 256 |
| | | NSGETSYAQKFQDRVTMTRDTSISTAYMELSRLRSDDTAVYFCAREATIFGMLIVP | |
| | | FDYWGQGTLVTVSS | |
| iPS:359712 | 11C1.005 | QVPLVQSGAEVKKPGASVKVSCKASGYTFTGYYIHWVRQAPGQGLVWMGWISP | 257 |
| | | NSGETSYAQKFQDRVTMTRDTSISTAYMELSRLRSDDTAVYFCTREATIFGMLIVP | |
| | | FDYWGQGTLVTVSS | |
| iPS:361293 | 11C1.006 | QVPLVQSGAEVKKPGASVKVSCKASGYTFTGYYIHWVRQAPGQGLVWMGWISP | 258 |
| | | NSGDTSYAQKFQDRVTMTRDTSISTAYMELSRLRSDDTAVYFCTREATIFGMLIVP | |
| | | FDYWGQGTLVTVSS | |
| iPS:361297 | 11C1.007 | QVPLVQSGAEVKKPGASVKVSCKASGYTFTGYYIHWVRQAPGQGLVWMGWISP | 259 |
| | | NSGETSYAQKFQDRVTMTRDTSISTAYMELSRLRSDDTAVYFCTREATIFGMLIVP | |
| | | FDYWGQGTLVTVSS | |
| iPS:361301 | 11C1.008 | QVPLVQSGAEVKKPGASVKVSCKASGYTFTGYYIHWVRQAPGQGLVWMGWISP | 260 |
| | | NSGDTSYAQKFQDRVTMTRDTSISTAYMELSRLRSDDTAVYFCAREATIFGMLIVP | |
| | | FDYWGQGTLVTVSS | |
| iPS:359703 | 11C1.009 | QVQLVQSGAEVKKPGASVKVSCKASGYTFTGYYIHWVRQAPGQGLEWMGWISP | 261 |
| | | NSGETSYAQKFQDRVTMTRDTSISTAYMELSSLRSDDTAVYFCAREATIFGMLIVP | |
| | | FDYWGQGTLVTVSS | |
| iPS:361305 | 11C1.010 | QVQLVQSGAEVKKPGASVKVSCKASGYTFTGYYIHWVRQAPGQGLEWMGWISP | 262 |
| | | NSGETSYAQKFQDRVTMTRDTSISTAYMELSRLRSDDTAVYFCAREATIFGMLIVP | |
| | | FDYWGQGTLVTVSS | |
| iPS:361312 | 13H12.002 | QVPLVQSGAEVKKPGASVKVSCKASGYTFTGYYIHWVRQAPGQGLEWMGWINP | 263 |
| | | ESGGTDYSQRFQGRVTMTRDTSISTAYMELSRLRSDDTAVYYCAREATIFGMVIVP | |
| | | FDYWGQGTLVTVSS | |
| iPS:359744 | 13H12.003 | QVPLVQSGAEVKKPGASVKVSCKASGYTFTGYYIHWVRQAPGQGLEWMGWINP | 264 |
| | | ESGGTDYSQRFQGRFTMTRDTSISTAYMELSRLRSDDTAVYYCAREATIFGMVIVP | |
| | | FDYWGQGTLVTVSS | |
| iPS:361319 | 13H12.004 | QVPLVQSGAEVKKPGASVKVSCKASGYTFTGYYIHWVRQAPGQGLEWMGWINP | 265 |
| | | DSGGTDYSQRFQGRVTMTRDTSISTAYMELSRLRSDDTAVYYCAREATIFGMVIV | |
| | | PFDYWGQGTLVTVSS | |
| iPS:359737 | 13H12.005 | QVQLVQSGAEVKKPGASVKVSCKASGYTFTGYYIHWVRQAPGQGLEWMGWINP | 266 |
| | | ESGGTDYSQRFQGRVTMTRDTSISTAYMELSSLRSDDTAVYYCAREATIFGMVIVP | |
| | | FDYWGQGTLVTVSS | |
| iPS:361326 | 13H12.006 | QVPLVQSGAEVKKPGASVKVSCKASGYTFTGYYIHWVRQAPGQGLEWMGWINP | 267 |
| | | ESGGTDYSQRFQGRVTMTRDTSISTAYMELSRLRSDDTAVYYCAREATIFGMVIVP | |
| | | FDYWGQGTLVTVSS | |
| iPS:361330 | 12H11.002 | QVPLVQSGAEVKKPGASVKVSCKASGYTFTGYYIHWVRQAPGQGLEWMGWISPN | 268 |
| | | QGETNYAQKFQDRVTMTRDTSISTAYMELSRLRSDDTAVYYCAREATIFGMLIVP | |
| | | FDYWGQGTLVTVSS | |
| iPS:361337 | 12H11.003 | QVPLVQSGAEVKKPGASVKVSCKASGYTFTGYYIHWVRQAPGQGLEWMGWISPN | 269 |
| | | QGDTNYAQKFQDRVTMTRDTSISTAYMELSRLRSDDTAVYYCAREATIFGMLIVP | |
| | | FDYWGQGTLVTVSS | |
| iPS:361344 | 12H11.004 | QVPLVQSGAEVKKPGASVKVSCKASGYTFTGYYIHWVRQAPGQGLEWMGWISPN | 270 |
| | | QGETNYAQKFQDRVTMTRDTSISTAYMELSRLRSDDTAVYYCTREATIFGMLIVPF | |
| | | DYWGQGTLVTVSS | |
| iPS:361351 | 12H11.005 | QVPLVQSGAEVKKPGASVKVSCKASGYTFTGYYIHWVRQAPGQGLEWMGWISPN | 271 |
| | | NGETNYAQKFQDRVTMTRDTSISTAYMELSRLRSDDTAVYYCAREATIFGMLIVP | |
| | | FDYWGQGTLVTVSS | |
| iPS:361358 | 12H11.006 | QVPLVQSGAEVKKPGASVKVSCKASGYTFTGYYIHWVRQAPGQGLEWMGWISPN | 272 |
| | | NGDTNYAQKFQDRVTMTRDTSISTAYMELSRLRSDDTAVYYCAREATIFGMLIVP | |
| | | FDYWGQGTLVTVSS | |
| iPS:361365 | 12H11.007 | QVPLVQSGAEVKKPGASVKVSCKASGYTFTGYYIHWVRQAPGQGLEWMGWISPN | 273 |
| | | QGDTNYAQKFQDRVTMTRDTSISTAYMELSRLRSDDTAVYYCTREATIFGMLIVP | |
| | | FDYWGQGTLVTVSS | |
| iPS:361372 | 12H11.008 | QVPLVQSGAEVKKPGASVKVSCKASGYTFTGYYIHWVRQAPGQGLEWMGWISPN | 274 |
| | | NGETNYAQKFQDRVTMTRDTSISTAYMELSRLRSDDTAVYYCTREATIFGMLIVPF | |
| | | DYWGQGTLVTVSS | |
| iPS:361379 | 12H11.009 | QVPLVQSGAEVKKPGASVKVSCKASGYTFTGYYIHWVRQAPGQGLEWMGWISPN | 275 |
| | | QGETNYAQKFQDRVTMTRDTSISTAYMELSRLRSDDTAVYYCAREATIFGMLIVP | |
| | | FDYWGQGTLVTVSS | |
| iPS:361383 | 12H11.010 | QVPLVQSGAEVKKPGASVKVSCKASGYTFTGYYIHWVRQAPGQGLEWMGWISPN | 276 |
| | | NGDTNYAQKFQDRVTMTRDTSISTAYMELSRLRSDDTAVYYCAREATIFGMLIVP | |
| | | FDYWGQGTLVTVSS | |
| iPS:361387 | 12H11.011 | QVPLVQSGAEVKKPGASVKVSCKASGYTFTGYYIHWVRQAPGQGLEWMGWISPN | 277 |
| | | QGDTNYAQKFQDRVTMTRDTSISTAYMELSRLRSDDTAVYYCAREATIFGMLIVP | |
| | | FDYWGQGTLVTVSS | |
| iPS:361391 | 12H11.012 | QVPLVQSGAEVKKPGASVKVSCKASGYTFTGYYIHWVRQAPGQGLEWMGWISPN | 278 |
| | | NGETNYAQKFQDRVTMTRDTSISTAYMELSRLRSDDTAVYYCAREATIFGMLIVP | |
| | | FDYWGQGTLVTVSS | |
| iPS:361395 | 12H11.013 | QVQLVQSGAEVKKPGASVKVSCKASGYTFTGYYIHWVRQAPGQGLEWMGWISP | 279 |
| | | NQGETNYAQKFQDRVTMTRDTSISTAYMELSSLRSDDTAVYYCAREATIFGMLIV | |
| | | PFDYWGQGTLVTVSS | |
| iPS:361402 | 12H11.014 | QVQLVQSGAEVKKPGASVKVSCKASGYTFTGYYIHWVRQAPGQGLEWMGWISP | 280 |
| | | NQGETNYAQKFQDRVTMTRDTSISTAYMELSSLRSDDTAVYYCAREATIFGMLIV | |
| | | PFDYWGQGTLVTVSS | |
| iPS:361406 | 2C2.005.001 | QMQVVQSGAEVKKPGASVKVSCKASGYTFTGYYMHWVRQAPGQGLEWMGWIN | 281 |
| | | PNSGGTNYAQKFQGRVTMTRDTSISTAYMELSRLRSDDTAVYYCARGGDYVWGT | |
| | | YRPHYYYGMDVWGQGTTVTVSS | |
| iPS:361412 | 2C2.005.002 | QMQVVQSGAEVKKPGASVKVSCKASGYTFTGYYMHWVRQAPGQGLEWMGWIN | 282 |
| | | PNSGGTNYAQKFQGRVTMTRDTSISTAYMELSRLRSDDTAVYYCARGGDYVWGT | |
| | | YRPHYYYGMDVWGQGTTVTVSS | |
| iPS:361418 | 2C2.005.003 | QMQVVQSGAEVKKPGASVKVSCKASGYTFTGYYMHWVRQAPGQGLEWMGWIN | 283 |
| | | PNSGGTNYAQKFQGRVTMTRDTSISTAYMELSRLRSDDTAVYYCARGGDYVWGT | |
| | | YRPHYYYGMDVWGQGTTVTVSS | |
| iPS:361424 | 2C2.005.004 | QMQVVQSGAEVKKPGASVKVSCKASGYTFTGYYMHWVRQAPGQGLEWMGWIN | 284 |
| | | PNSGGTNYAQKFQGRVTMTRDTSISTAYMELSRLRSDDTAVYYCARGGDYVWGT | |
| | | YRPHYYYGMDVWGQGTTVTVSS | |
| iPS:361430 | 2C2.005.005 | QMQVVQSGAEVKKPGASVKVSCKASGYTFTGYYMHWVRQAPGQGLEWMGWIN | 285 |
| | | PNSGGTNYAQKFQGRVTMTRDTSISTAYMELSRLRSDDTAVYYCARGGDYVWGT | |
| | | YRPHYYYGMDVWGQGTTVTVSS | |
| iPS:361436 | 2C2.005.006 | QMQVVQSGAEVKKPGASVKVSCKASGYTFTGYYMHWVRQAPGQGLEWMGWIN | 286 |
| | | PNSGGTNYAQKFQGRVTMTRDTSISTAYMELSRLRSDDTAVYYCARGGDYVWGT | |
| | | YRPHYYYGMDVWGQGTTVTVSS | |
| iPS:361442 | 2C2.005.007 | QMQVVQSGAEVKKPGASVKVSCKASGYTFTGYYMHWVRQAPGQGLEWMGWIN | 287 |
| | | PNSGGTNYAQKFQGRVTMTRDTSISTAYMELSRLRSDDTAVYYCARGGDYVWGT | |
| | | YRPHYYYGMDVWGQGTTVTVSS | |
| iPS:361448 | 2C2.005.008 | QMQVVQSGAEVKKPGASVKVSCKASGYTFTGYYMHWVRQAPGQGLEWMGWIN | 288 |
| | | PNSGGTNYAQKFQGRVTMTRDTSISTAYMELSRLRSDDTAVYYCARGGDYVWGT | |
| | | YRPHYYYGMDVWGQGTTVTVSS | |
| iPS:361454 | 2C2.005.009 | QMQVVQSGAEVKKPGASVKVSCKASGYTFTGYYMHWVRQAPGQGLEWMGWIN | 289 |
| | | PNSGGTNYAQKFQGRVTMTRDTSISTAYMELSRLRSDDTAVYYCARGGDYVWGT | |
| | | YRPHYYYGMDVWGQGTTVTVSS | |
| iPS:361460 | 2C2.005.010 | QMQVVQSGAEVKKPGASVKVSCKASGYTFTGYYMHWVRQAPGQGLEWMGWIN | 290 |
| | | PNSGGTNYAQKFQGRVTMTRDTSISTAYMELSRLRSDDTAVYYCARGGDYVWGT | |
| | | YRPHYYYGMDVWGQGTTVTVSS | |
| iPS:361466 | 2C2.005.011 | QMQVVQSGAEVKKPGASVKVSCKASGYTFTGYYMHWVRQAPGQGLEWMGWIN | 291 |
| | | PNSGGTNYAQKFQGRVTMTRDTSISTAYMELSRLRSDDTAVYYCARGGDYVWGT | |
| | | YRPHYYYGMDVWGQGTTVTVSS | |
| iPS:361472 | 2C2.005.012 | QMQVVQSGAEVKKPGASVKVSCKASGYTFTGYYMHWVRQAPGQGLEWMGWIN | 292 |
| | | PNSGGTNYAQKFQGRVTMTRDTSISTAYMELSRLRSDDTAVYYCARGGDYVWGT | |
| | | YRPHYYYGMDVWGQGTTVTVSS | |
| iPS:361478 | 2C2.005.013 | QMQVVQSGAEVKKPGASVKVSCKASGYTFTGYYMHWVRQAPGQGLEWMGWIN | 293 |
| | | PNSGGTNYAQKFQGRVTMTRDTSISTAYMELSSLRSDDTAVYYCARGGDYVFGT | |
| | | YRPHYYYGMDVWGQGTTVTVSS | |
| iPS:361485 | 2C2.005.014 | QMQVVQSGAEVKKPGASVKVSCKASGYTFTGYYMHWVRQAPGQGLEWMGWIN | 294 |
| | | PNSGGTNYAQKFQGRVTMTRDTSISTAYMELSRLRSDDTAVYYCARGGDYVFGT | |
| | | YRPHYYYGMDVWGQGTTVTVSS | |
| iPS:361845 | 18F2.013 | QVQLVESGGGVVQPGRSLRLSCAASGFTFSNFGMHWVRQAPGKGLEWVAVIWY | 295 |
| | | DASNENYADAVKGRFTISRDNSKNTLYLQMNSLRAEDTAVYYCARDRTIFGVVL | |
| | | GDYWGQGTLVTVSS | |
| iPS:361851 | 6H1.009 | QVQLVESGGGVVQPGRSLRLSCAASGFTFSYFGMHWVRQAPGKGLEWVAVIWY | 296 |
| | | DASNKYYADAVKGRFTISRDNSKNTLYLQMNSLRAEDTAVYYCARDRTIFGVLL | |
| | | GDYWGQGTLVTVSS | |
| iPS:361855 | 2C2.005.015 | QMQVVQSGAEVKKPGASVKVSCKASGYTFTGYYMHWVRQAPGQGLEWMGWIN | 297 |
| | | PNSGGTNYAQKFQGRVTMTRDTSISTAYMELSRLRSDDTAVYYCARGGDYVWGT | |
| | | YRPHYYYGMDVWGQGTTVTVSS | |
| iPS:336067 | 5G12.006 | QVQLVESGGGVVQPGRSLRLSCTASGFTFSSYGIHWVRQAPGKGLEWVAVIWYD | 298 |
| | | GSNKFHADSVKGRFTISRDNSKNTLYLQMNSLRAEDSAMYFCARGKVAGMPEAF | |
| | | EIWGQGTKVTVSS | |
| iPS:336169 | 17B11.002 | QMQLVQSGAEVKKPGASVKVSCKASGYTFTSYDINWVRQATGQGLEWMGWMN | 299 |
| | | PNSGNTGYAQKFQGRVTMTRDTSISTAYMELSSLRSQDTAVYYCARGGDYVWGS | |
| | | YRPYYYYYGMDVWGQGTTVTVSS | |
| iPS:361127 | 5G12.006.001 | QVQLVESGGGVVQPGRSLRLSCAASGFTFSSYGIHWVRQAPGKGLEWVAVIWYD | 300 |
| | | ASNKFHADAVKGRFTISRDNSKNTLYLQMNSLRAEDSAMYFCARGKVAGMPEAF | |
| | | EIWGQGTKVTVSS | |
| iPS:361136 | 5G12.006.002 | QVQLVESGGGVVQPGRSLRLSCTASGFTFSSYGIHWVRQAPGKGLEWVAVIWYD | 301 |
| | | ASNKFHADAVKGRFTISRDNSKNTLYLQMNSLRAEDSAMYFCARGKVAGMPEAF | |
| | | EIWGQGTKVTVSS | |
| iPS:361140 | 5G12.006.003 | QVQLVESGGGVVQPGRSLRLSCAASGFTFSSYGIHWVRQAPGKGLEWVAVIWYD | 302 |
| | | ASNKFHADAVKGRFTISRDNSKNTLYLQMNSLRAEDSAMYFCARGKVAGMPEAF | |
| | | EIWGQGTKVTVSS | |
| iPS:359919 | 5G12.006.004 | QVQLVESGGGVVQPGRSLRLSCAASGFTFSSYGIHWVRQAPGKGLEWVAVIWYD | 303 |
| | | ASNKFHADAVKGRFTISRDNSKNTLYLQMNSLRAEDSAMYFCARGKVAGMPEAF | |
| | | EIWGQGTLVTVSS | |
| iPS:361144 | 5G12.006.005 | QVQLVESGGGVVQPGRSLRLSCAASGFTFSSYGIHWVRQAPGKGLEWVAVIWYD | 304 |
| | | ASNKFHADSVKGRFTISRDNSKNTLYLQMNSLRAEDSAMYFCARGKVAGMPEAF | |
| | | EIWGQGTKVTVSS | |
| iPS:361151 | 5G12.006.006 | QVQLVESGGGVVQPGRSLRLSCAASGFTFSSYGIHWVRQAPGKGLEWVAVIWYD | 305 |
| | | GSNKFHADAVKGRFTISRDNSKNTLYLQMNSLRAEDSAMYFCARGKVAGMPEAF | |
| | | EIWGQGTKVTVSS | |
| iPS:361491 | 17B11.002.001 | QMQLVQSGAEVKKPGASVKVSCKASGYTFTSYDINWVRQATGQGLEWMGWMN | 306 |
| | | PNSGGTGYAQKFQGRVTMTRDTSISTAYMELSSLRSQDTAVYYCARGGDYVWGS | |
| | | YRPYYYYYGMDVWGQGTTVTVSS | |
| iPS:361499 | 17B11.002.002 | QMQLVQSGAEVKKPGASVKVSCKASGYTFTSYDINWVRQATGQGLEWMGWMN | 307 |
| | | PNSGNTGYAQKFQGRVTMTRDTSISTAYMELSSLRSQDTAVYYCARGGDYVWGS | |
| | | YRPYYYYYGMDVWGQGTTVTVSS | |
| iPS:361503 | 17B11.002.003 | QMQLVQSGAEVKKPGASVKVSCKASGYTFTSYDINWVRQATGQGLEWMGWMN | 308 |
| | | PNSGGTGYAQKFQGRVTMTRDTSISTAYMELSSLRSQDTAVYYCARGGDYVWGS | |
| | | YRPYYYYYGMDVWGQGTTVTVSS | |
| iPS:361507 | 17B11.002.004 | QMQLVQSGAEVKKPGASVKVSCKASGYTFTSYDINWVRQAPGQGLEWMGWMN | 309 |
| | | PNSGGTGYAQKFQGRVTMTRDTSISTAYMELSSLRSDDTAVYYCARGGDYVWGS | |
| | | YRPYYYYYGMDVWGQGTTVTVSS | |
| iPS:361514 | 17B11.002.005 | QMQLVQSGAEVKKPGASVKVSCKASGYTFTSYDINWVRQATGQGLEWMGWMN | 310 |
| | | PNSGGTGYAQKFQGRVTMTRDTSISTAYMELSSLRSQDTAVYYCARGGDYVWGS | |
| | | YRPYYYYYGMDVWGQGTTVTVSS | |
| iPS:360582 | 17B11.002.006 | QMQLVQSGAEVKKPGASVKVSCKASGYTFTSYDINWVRQAPGQGLEWMGWMN | 311 |
| | | PNSGNTGYAQKFQGRVTMTRDTSISTAYMELSSLRSDDTAVYYCARGGDYVWGS | |
| | | YRPYYYYYGMDVWGQGTTVTVSS | |
| iPS:361518 | 17B11.002.007 | QMQLVQSGAEVKKPGASVKVSCKASGYTFTSYDINWVRQATGQGLEWMGWMN | 312 |
| | | PNSGGTGYAQKFQGRVTMTRDTSISTAYMELSSLRSQDTAVYYCARGGDYVFGS | |
| | | YRPYYYYYGMDVWGQGTTVTVSS | |
| iPS:360570 | 17B11.002.008 | QMQLVQSGAEVKKPGASVKVSCKASGYTFTSYDINWVRQAPGQGLEWMGWMN | 313 |
| | | PNSGGTGYAQKFQGRVTMTRDTSISTAYMELSSLRSDDTAVYYCARGGDYVFGS | |
| | | YRPYYYYYGMDVWGQGTTVTVSS | |
| iPS:362051 | 5G12.005.001 | QVQLVESGGGVVQPGRSLRLSCAASGFTFSSYGIHWVRQAPGKGLEWVAVIWYD | 314 |
| | | ASNKFHADAVKGRFTISRDNSKNTLYLQMNSLRAEDSAMYFCARGKVAGMPEAF | |
| | | EIWGQGTLVTVSS | |

TABLE 12
CDRL1, CDRL2, and CDRL3 Amino Acid Sequences of Example Anti-GIPR Antibodies

| Identifier | Construct | CDRL1 | CDRL2 | CDRL3 |
|---|---|---|---|---|
| iPS: 336175 | 2C2.005 | SGSSSNIGSNTVN | TNNQRPS | ATFDDSLNGPV |
| | | SEQ ID NO: 629 | SEQ ID NO: 786 | SEQ ID NO: 943 |
| iPS: 335914 | 4B1 | RASQDIRDYLG | GASSLQS | LQHNNYPFT |
| | | SEQ ID NO: 630 | SEQ ID NO: 787 | SEQ ID NO: 944 |
| iPS: 335938 | 6H1 | RASQDIRDYLG | GASSLQS | LQHNNYPFT |
| | | SEQ ID NO: 631 | SEQ ID NO: 788 | SEQ ID NO: 945 |
| iPS: 335941 | 2F11 | QASQDISNYLN | DASNLET | QQYDILLT |
| | | SEQ ID NO: 632 | SEQ ID NO: 789 | SEQ ID NO: 946 |
| iPS: 335970 | 5C2 | KSSQSVLSSSNNKNYIA | WASTRES | QQYYSTPWT |
| | | SEQ ID NO: 633 | SEQ ID NO: 790 | SEQ ID NO: 947 |
| iPS: 335978 | 13H12 | KSSQSVLSSSNNKNYIA | WASTRES | QQYYSTPWT |
| | | SEQ ID NO: 634 | SEQ ID NO: 791 | SEQ ID NO: 948 |
| iPS: 335986 | 11C1 | KSSQSVLSSSNNKNYLA | WTSTRDS | QQYYRTPWT |
| | | SEQ ID NO: 635 | SEQ ID NO: 792 | SEQ ID NO: 949 |
| iPS: 335994 | 12H11 | KSSQSVLSSSNNKNYLA | WTSTRDS | QQYYRTPWT |
| | | SEQ ID NO: 636 | SEQ ID NO: 793 | SEQ ID NO: 950 |
| iPS: 336024 | 18E3 | RASQSISYSYLA | GASSRAT | QQYGSSPLT |
| | | SEQ ID NO: 637 | SEQ ID NO: 794 | SEQ ID NO: 951 |
| iPS: 336041 | 2G10_LC1 | RASQSVSSNLA | GAATRAT | QQYNNWPLT |
| | | SEQ ID NO: 638 | SEQ ID NO: 795 | SEQ ID NO: 952 |
| iPS: 336077 | 4H9.004 | RASQGIRNELG | GASSLQS | LQHNSYPFT |
| | | SEQ ID NO: 639 | SEQ ID NO: 796 | SEQ ID NO: 953 |
| iPS: 336088 | 6A5.004 | QASQDITNYLN | DASNLEP | QQYDDLFT |
| | | SEQ ID NO: 640 | SEQ ID NO: 797 | SEQ ID NO: 954 |
| iPS: 336099 | 17H11.004 | RASQGLIIWLA | AASSLQS | QQTNSFPPT |
| | | SEQ ID NO: 641 | SEQ ID NO: 798 | SEQ ID NO: 955 |
| iPS: 359621 | 17H11.004.001 | RASQGLIIWLA | AASSLQS | QQTNSFPPT |
| | | SEQ ID NO: 642 | SEQ ID NO: 799 | SEQ ID NO: 956 |
| iPS: 359781 | 4H9.004.001 | RASQGIRNELG | GASSLQS | LQHNSYPFT |
| | | SEQ ID NO: 643 | SEQ ID NO: 800 | SEQ ID NO: 957 |
| iPS: 360929 | 4H9.004.002 | RASQGIRNELG | GASSLQS | LQHNSYPFT |
| | | SEQ ID NO: 644 | SEQ ID NO: 801 | SEQ ID NO: 958 |
| iPS: 360936 | 4H9.004.003 | RASQGIRNELG | GASSLQS | LQHNSYPFT |
| | | SEQ ID NO: 645 | SEQ ID NO: 802 | SEQ ID NO: 959 |
| iPS: 360943 | 4H9.004.004 | RASQGIRNELG | GASSLQS | LQHNSYPFT |
| | | SEQ ID NO: 646 | SEQ ID NO: 803 | SEQ ID NO: 960 |
| iPS: 360949 | 4H9.004.005 | RASQGIRNELG | GASSLQS | LQHNSYPFT |
| | | SEQ ID NO: 647 | SEQ ID NO: 804 | SEQ ID NO: 961 |
| iPS: 359761 | 4H9.004.006 | RASQGIRNELG | GASSLQS | LQHNSYPFT |
| | | SEQ ID NO: 648 | SEQ ID NO: 805 | SEQ ID NO: 962 |
| iPS: 360955 | 4B1.010 | RASQDIRDYLG | GASSLQS | LQHNNYPFT |
| | | SEQ ID NO: 649 | SEQ ID NO: 806 | SEQ ID NO: 963 |
| iPS: 360962 | 4B1.011 | RASQDIRDYLG | GASSLQS | LQHNNYPFT |
| | | SEQ ID NO: 650 | SEQ ID NO: 807 | SEQ ID NO: 964 |
| iPS: 360968 | 4B1.012 | RASQDIRDYLG | GASSLQS | LQHNNYPFT |
| | | SEQ ID NO: 651 | SEQ ID NO: 808 | SEQ ID NO: 965 |
| iPS: 360974 | 4B1.013 | RASQDIRDYLG | GASSLQS | LQHNNYPFT |
| | | SEQ ID NO: 652 | SEQ ID NO: 809 | SEQ ID NO: 966 |
| iPS: 360978 | 4B1.014 | RASQDIRDYLG | GASSLQS | LQHNNYPFT |
| | | SEQ ID NO: 653 | SEQ ID NO: 810 | SEQ ID NO: 967 |
| iPS: 359785 | 4B1.015 | RASQDIRDYLG | GASSLQS | LQHNNYPFT |
| | | SEQ ID NO: 654 | SEQ ID NO: 811 | SEQ ID NO: 968 |
| iPS: 360982 | 4B1.016 | RASQDIRDYLG | GASSLQS | LQHNNYPFT |
| | | SEQ ID NO: 655 | SEQ ID NO: 812 | SEQ ID NO: 969 |
| iPS: 335922 | 18F2 | RASQDLRNYLG | GASSLQS | LQHNNYPFT |
| | | SEQ ID NO: 656 | SEQ ID NO: 813 | SEQ ID NO: 970 |
| iPS: 360986 | 18F2.002 | RASQDLRNYLG | GASSLQS | LQHNNYPFT |
| | | SEQ ID NO: 657 | SEQ ID NO: 814 | SEQ ID NO: 971 |
| iPS: 360995 | 18F2.003 | RASQDLRNYLG | GASSLQS | LQHNNYPFT |
| | | SEQ ID NO: 658 | SEQ ID NO: 815 | SEQ ID NO: 972 |
| iPS: 360999 | 18F2.004 | RASQDLRNYLG | GASSLQS | LQHNNYPFT |
| | | SEQ ID NO: 659 | SEQ ID NO: 816 | SEQ ID NO: 973 |
| iPS: 361005 | 18F2.005 | RASQDLRNYLG | GASSLQS | LQHNNYPFT |
| | | SEQ ID NO: 660 | SEQ ID NO: 817 | SEQ ID NO: 974 |
| iPS: 361009 | 18F2.006 | RASQDLRNYLG | GASSLQS | LQHNNYPFT |
| | | SEQ ID NO: 661 | SEQ ID NO: 818 | SEQ ID NO: 975 |
| iPS: 361013 | 18F2.007 | RASQDLRNYLG | GASSLQS | LQHNNYPFT |
| | | SEQ ID NO: 662 | SEQ ID NO: 819 | SEQ ID NO: 976 |
| iPS: 361017 | 18F2.008 | RASQDLRNYLG | GASSLQS | LQHNNYPFT |
| | | SEQ ID NO: 663 | SEQ ID NO: 820 | SEQ ID NO: 977 |
| iPS: 361021 | 18F2.009 | RASQDLRNYLG | GASSLQS | LQHNNYPFT |
| | | SEQ ID NO: 664 | SEQ ID NO: 821 | SEQ ID NO: 978 |
| iPS: 361028 | 18F2.010 | RASQDLRNYLG | GASSLQS | LQHNNYPFT |
| | | SEQ ID NO: 665 | SEQ ID NO: 822 | SEQ ID NO: 979 |
| iPS: 360535 | 18F2.011 | RASQDLRNYLG | GASSLQS | LQHNNYPFT |
| | | SEQ ID NO: 666 | SEQ ID NO: 823 | SEQ ID NO: 980 |
| iPS: 361035 | 18F2.012 | RASQDLRNYLG | GASSLQS | LQHNNYPFT |
| | | SEQ ID NO: 667 | SEQ ID NO: 824 | SEQ ID NO: 981 |
| iPS: 359940 | 2F11.002 | QASQDISNYLN | DASNLET | QQYDILLT |
| | | SEQ ID NO: 668 | SEQ ID NO: 825 | SEQ ID NO: 982 |
| iPS: 361039 | 2F11.003 | QASQDISNYLN | DASNLET | QQYDILLT |
| | | SEQ ID NO: 669 | SEQ ID NO: 826 | SEQ ID NO: 983 |
| iPS: 361043 | 2F11.004 | QASQDISNYLN | DASNLET | QQYDILLT |
| | | SEQ ID NO: 670 | SEQ ID NO: 827 | SEQ ID NO: 984 |
| iPS: 361049 | 2F11.005 | QASQDISNYLN | DASNLET | QQYDILLT |
| | | SEQ ID NO: 671 | SEQ ID NO: 828 | SEQ ID NO: 985 |
| iPS: 361055 | 2F11.006 | QASQDISNYLN | DASNLET | QQYDILLT |
| | | SEQ ID NO: 672 | SEQ ID NO: 829 | SEQ ID NO: 986 |
| iPS: 361059 | 2F11.007 | QASQDISNYLN | DASNLET | QQYDILLT |
| | | SEQ ID NO: 673 | SEQ ID NO: 830 | SEQ ID NO: 987 |
| iPS: 361063 | 2F11.008 | QASQDISNYLN | DASNLET | QQYDILLT |
| | | SEQ ID NO: 674 | SEQ ID NO: 831 | SEQ ID NO: 988 |
| iPS: 359949 | 2F11.009 | QASQDISNYLN | DASNLET | QQYDILLT |
| | | SEQ ID NO: 675 | SEQ ID NO: 832 | SEQ ID NO: 989 |
| iPS: 359956 | 2F11.010 | QASQDISNYLN | DASNLET | QQYDILLT |
| | | SEQ ID NO: 676 | SEQ ID NO: 833 | SEQ ID NO: 990 |
| iPS: 359865 | 6H1.002 | RASQDIRDYLG | GASSLQS | LQHNNYPFT |
| | | SEQ ID NO: 677 | SEQ ID NO: 834 | SEQ ID NO: 991 |
| iPS: 359869 | 6H1.003 | RASQDIRDYLG | GASSLQS | LQHNNYPFT |
| | | SEQ ID NO: 678 | SEQ ID NO: 835 | SEQ ID NO: 992 |
| iPS: 359873 | 6H1.004 | RASQDIRDYLG | GASSLQS | LQHNNYPFT |
| | | SEQ ID NO: 679 | SEQ ID NO: 836 | SEQ ID NO: 993 |
| iPS: 359877 | 6H1.005 | RASQDIRDYLG | GASSLQS | LQHNNYPFT |
| | | SEQ ID NO: 680 | SEQ ID NO: 837 | SEQ ID NO: 994 |
| iPS: 361067 | 6H1.006 | RASQDIRDYLG | GASSLQS | LQHNNYPFT |
| | | SEQ ID NO: 681 | SEQ ID NO: 838 | SEQ ID NO: 995 |
| iPS: 361071 | 6H1.007 | RASQDIRDYLG | GASSLQS | LQHNNYPFT |
| | | SEQ ID NO: 682 | SEQ ID NO: 839 | SEQ ID NO: 996 |
| iPS: 361075 | 6H1.008 | RASQDIRDYLG | GASSLQS | LQHNNYPFT |
| | | SEQ ID NO: 683 | SEQ ID NO: 840 | SEQ ID NO: 997 |
| iPS: 361079 | 6A5.004.001 | QASQDITNYLN | DASNLEP | QQYDDLFT |
| | | SEQ ID NO: 684 | SEQ ID NO: 841 | SEQ ID NO: 998 |
| iPS: 361085 | 6A5.004.002 | QASQDITNYLN | DASNLEP | QQYDDLFT |
| | | SEQ ID NO: 685 | SEQ ID NO: 842 | SEQ ID NO: 999 |
| iPS: 361091 | 6A5.004.003 | QASQDITNYLN | DASNLEP | QQYDDLFT |
| | | SEQ ID NO: 686 | SEQ ID NO: 843 | SEQ ID NO: 1000 |
| iPS: 361095 | 6A5.004.004 | QASQDITNYLN | DASNLEP | QQYDDLFT |
| | | SEQ ID NO: 687 | SEQ ID NO: 844 | SEQ ID NO: 1001 |
| iPS: 361101 | 6A5.004.005 | QASQDITNYLN | DASNLEP | QQYDDLFT |
| | | SEQ ID NO: 688 | SEQ ID NO: 845 | SEQ ID NO: 1002 |
| iPS: 361105 | 6A5.004.006 | QASQDITNYLN | DASNLEP | QQYDDLFT |
| | | SEQ ID NO: 689 | SEQ ID NO: 846 | SEQ ID NO: 1003 |
| iPS: 361109 | 6A5.004.007 | QASQDITNYLN | DASNLEP | QQYDDLFT |
| | | SEQ ID NO: 690 | SEQ ID NO: 847 | SEQ ID NO: 1004 |
| iPS: 361113 | 6A5.004.008 | QASQDITNYLN | DASNLEP | QQYDDLFT |
| | | SEQ ID NO: 691 | SEQ ID NO: 848 | SEQ ID NO: 1005 |
| iPS: 361120 | 6A5.004.009 | QASQDITNYLN | DASNLEP | QQYDDLFT |
| | | SEQ ID NO: 692 | SEQ ID NO: 849 | SEQ ID NO: 1006 |
| iPS: 359896 | 6A5.004.010 | QASQDITNYLN | DASNLEP | QQYDDLFT |
| | | SEQ ID NO: 693 | SEQ ID NO: 850 | SEQ ID NO: 1007 |
| iPS: 359890 | 6A5.004.011 | QASQDITNYLN | DASNLEP | QQYDDLFT |
| | | SEQ ID NO: 694 | SEQ ID NO: 851 | SEQ ID NO: 1008 |
| iPS: 359567 | 2A11.002 | RASQIFTSTYLA | GASSRAT | QQYGSSPR |
| | | SEQ ID NO: 695 | SEQ ID NO: 852 | SEQ ID NO: 1009 |
| iPS: 335965 | 2A11.003 | RASQIFTSTYLA | GASSRAT | QQYGSSPR |
| | | SEQ ID NO: 696 | SEQ ID NO: 853 | SEQ ID NO: 1010 |
| iPS: 361158 | 2A11.004 | RASQIFTSTYLA | GASSRAT | QQYGSSPR |
| | | SEQ ID NO: 697 | SEQ ID NO: 854 | SEQ ID NO: 1011 |
| iPS: 361165 | 2A11.005 | RASQIFTSTYLA | GASSRAT | QQYGSSPR |
| | | SEQ ID NO: 698 | SEQ ID NO: 855 | SEQ ID NO: 1012 |
| iPS: 361172 | 2G10_LC1.003 | RASQSVSSNLA | GAATRAT | QQYNNWPLT |
| | | SEQ ID NO: 699 | SEQ ID NO: 856 | SEQ ID NO: 1013 |
| iPS: 361178 | 2G10_LC1.004 | RASQSVSSNLA | GAATRAT | QQYNNWPLT |
| | | SEQ ID NO: 700 | SEQ ID NO: 857 | SEQ ID NO: 1014 |
| iPS: 361185 | 2G10_LC1.005 | RASQSVSSNLA | GAATRAT | QQYNNWPLT |
| | | SEQ ID NO: 701 | SEQ ID NO: 858 | SEQ ID NO: 1015 |
| iPS: 361192 | 2G10_LC1.006 | RASQSVSSNLA | GAATRAT | QQYNNWPLT |
| | | SEQ ID NO: 702 | SEQ ID NO: 859 | SEQ ID NO: 1016 |
| iPS: 359609 | 2G10_LC1.007 | RASQSVSSNLA | GAATRAT | QQYNNFPLT |
| | | SEQ ID NO: 703 | SEQ ID NO: 860 | SEQ ID NO: 1017 |
| iPS: 359615 | 2G10_LC1.008 | RASQSVSSNLA | GAATRAT | QQYNNYPLT |
| | | SEQ ID NO: 704 | SEQ ID NO: 861 | SEQ ID NO: 1018 |
| iPS: 361196 | 2G10_LC1.009 | RASQSVSSNLA | GAATRAT | QQYNNWPLT |
| | | SEQ ID NO: 705 | SEQ ID NO: 862 | SEQ ID NO: 1019 |
| iPS: 361202 | 2G10_LC1.010 | RASQSVSSNLA | GAATRAT | QQYNNWPLT |
| | | SEQ ID NO: 706 | SEQ ID NO: 863 | SEQ ID NO: 1020 |
| iPS: 359644 | 18E3.002 | RASQSISYSYLA | GASSRAT | QQYGSSPLT |
| | | SEQ ID NO: 707 | SEQ ID NO: 864 | SEQ ID NO: 1021 |
| iPS: 361206 | 18E3.003 | RASQSISYSYLA | GASSRAT | QQYGSSPLT |
| | | SEQ ID NO: 708 | SEQ ID NO: 865 | SEQ ID NO: 1022 |
| iPS: 359628 | 18E3.004 | RASQSISYSYLA | GASSRAT | QQYGSSPLT |
| | | SEQ ID NO: 709 | SEQ ID NO: 866 | SEQ ID NO: 1023 |
| iPS: 359637 | 18E3.005 | RASQSISYSYLA | GASSRAT | QQYGSSPLT |
| | | SEQ ID NO: 710 | SEQ ID NO: 867 | SEQ ID NO: 1024 |
| iPS: 361210 | 18E3.006 | RASQSISYSYLA | GASSRAT | QQYGSSPLT |
| | | SEQ ID NO: 711 | SEQ ID NO: 868 | SEQ ID NO: 1025 |
| iPS: 361214 | 18E3.007 | RASQSISYSYLA | GASSRAT | QQYGSSPLT |
| | | SEQ ID NO: 712 | SEQ ID NO: 869 | SEQ ID NO: 1026 |
| iPS: 361218 | 18E3.008 | RASQSISYSYLA | GASSRAT | QQYGSSPLT |
| | | SEQ ID NO: 713 | SEQ ID NO: 870 | SEQ ID NO: 1027 |
| iPS: 361222 | 5C2.006 | KSSQSVLSSSNNKNYIA | WASTRES | QQYYSTPWT |
| | | SEQ ID NO: 714 | SEQ ID NO: 871 | SEQ ID NO: 1028 |
| iPS: 361229 | 5C2.007 | KSSQSVLSSSNNKNYIA | WASTRES | QQYYSTPWT |
| | | SEQ ID NO: 715 | SEQ ID NO: 872 | SEQ ID NO: 1029 |
| iPS: 361236 | 5C2.008 | KSSQSVLSSSNNKNYIA | WASTRES | QQYYSTPWT |
| | | SEQ ID NO: 716 | SEQ ID NO: 873 | SEQ ID NO: 1030 |
| iPS: 359685 | 5C2.009 | KSSQSVLSSSNNKNYIA | WASTRES | QQYYSTPWT |
| | | SEQ ID NO: 717 | SEQ ID NO: 874 | SEQ ID NO: 1031 |
| iPS: 361240 | 5C2.010 | KSSQSVLSSSNNKNYIA | WASTRES | QQYYSTPWT |
| | | SEQ ID NO: 718 | SEQ ID NO: 875 | SEQ ID NO: 1032 |
| iPS: 361247 | 5C2.011 | KSSQSVLSSSNNKNYIA | WASTRES | QQYYSTPWT |
| | | SEQ ID NO: 719 | SEQ ID NO: 876 | SEQ ID NO: 1033 |
| iPS: 361254 | 5C2.012 | KSSQSVLSSSNNKNYIA | WASTRES | QQYYSTPWT |
| | | SEQ ID NO: 720 | SEQ ID NO: 877 | SEQ ID NO: 1034 |
| iPS: 361261 | 5C2.013 | KSSQSVLSSSNNKNYIA | WASTRES | QQYYSTPWT |
| | | SEQ ID NO: 721 | SEQ ID NO: 878 | SEQ ID NO: 1035 |
| iPS: 361268 | 5C2.014 | KSSQSVLSSSNNKNYIA | WASTRES | QQYYSTPWT |
| | | SEQ ID NO: 722 | SEQ ID NO: 879 | SEQ ID NO: 1036 |
| iPS: 359669 | 5C2.015 | KSSQSVLSSSNNKNYIA | WASTRES | QQYYSTPWT |
| | | SEQ ID NO: 723 | SEQ ID NO: 880 | SEQ ID NO: 1037 |
| iPS: 359678 | 5C2.016 | KSSQSVLSSSNNKNYIA | WASTRES | QQYYSTPWT |
| | | SEQ ID NO: 724 | SEQ ID NO: 881 | SEQ ID NO: 1038 |
| iPS: 361275 | 11C1.002 | KSSQSVLSSSNNKNYLA | WTSTRES | QQYYRTPWT |
| | | SEQ ID NO: 725 | SEQ ID NO: 882 | SEQ ID NO: 1039 |
| iPS: 361282 | 11C1.003 | KSSQSVLSSSNNKNYLA | WTSTRES | QQYYRTPWT |
| | | SEQ ID NO: 726 | SEQ ID NO: 883 | SEQ ID NO: 1040 |
| iPS: 361289 | 11C1.004 | KSSQSVLSSSNNKNYLA | WTSTRDS | QQYYRTPWT |
| | | SEQ ID NO: 727 | SEQ ID NO: 884 | SEQ ID NO: 1041 |
| iPS: 359712 | 11C1.005 | KSSQSVLSSSNNKNYLA | WTSTRES | QQYYRTPWT |
| | | SEQ ID NO: 728 | SEQ ID NO: 885 | SEQ ID NO: 1042 |
| iPS: 361293 | 11C1.006 | KSSQSVLSSSNNKNYLA | WTSTRES | QQYYRTPWT |
| | | SEQ ID NO: 729 | SEQ ID NO: 886 | SEQ ID NO: 1043 |
| iPS: 361297 | 11C1.007 | KSSQSVLSSSNNKNYLA | WTSTRDS | QQYYRTPWT |
| | | SEQ ID NO: 730 | SEQ ID NO: 887 | SEQ ID NO: 1044 |
| iPS: 361301 | 11C1.008 | KSSQSVLSSSNNKNYLA | WTSTRDS | QQYYRTPWT |
| | | SEQ ID NO: 731 | SEQ ID NO: 888 | SEQ ID NO: 1045 |
| iPS: 359703 | 11C1.009 | KSSQSVLSSSNNKNYLA | WTSTRES | QQYYRTPWT |
| | | SEQ ID NO: 732 | SEQ ID NO: 889 | SEQ ID NO: 1046 |
| iPS: 361305 | 11C1.010 | KSSQSVLSSSNNKNYLA | WTSTRES | QQYYRTPWT |
| | | SEQ ID NO: 733 | SEQ ID NO: 890 | SEQ ID NO: 1047 |
| iPS: 361312 | 13H12.002 | KSSQSVLSSSNNKNYIA | WASTRES | QQYYSTPWT |
| | | SEQ ID NO: 734 | SEQ ID NO: 891 | SEQ ID NO: 1048 |
| iPS: 359744 | 13H12.003 | KSSQSVLSSSNNKNYIA | WASTRES | QQYYSTPWT |
| | | SEQ ID NO: 735 | SEQ ID NO: 892 | SEQ ID NO: 1049 |
| iPS: 361319 | 13H12.004 | KSSQSVLSSSNNKNYIA | WASTRES | QQYYSTPWT |
| | | SEQ ID NO: 736 | SEQ ID NO: 893 | SEQ ID NO: 1050 |
| iPS: 359737 | 13H12.005 | KSSQSVLSSSNNKNYIA | WASTRES | QQYYSTPWT |
| | | SEQ ID NO: 737 | SEQ ID NO: 894 | SEQ ID NO: 1051 |
| iPS: 361326 | 13H12.006 | KSSQSVLSSSNNKNYIA | WASTRES | QQYYSTPWT |
| | | SEQ ID NO: 738 | SEQ ID NO: 895 | SEQ ID NO: 1052 |
| iPS: 361330 | 12H11.002 | KSSQSVLSSSNNKNYLA | WTSTRDS | QQYYRTPWT |
| | | SEQ ID NO: 739 | SEQ ID NO: 896 | SEQ ID NO: 1053 |
| iPS: 361337 | 12H11.003 | KSSQSVLSSSNNKNYLA | WTSTRDS | QQYYRTPWT |
| | | SEQ ID NO: 740 | SEQ ID NO: 897 | SEQ ID NO: 1054 |
| iPS: 361344 | 12H11.004 | KSSQSVLSSSNNKNYLA | WTSTRDS | QQYYRTPWT |
| | | SEQ ID NO: 741 | SEQ ID NO: 898 | SEQ ID NO: 1055 |
| iPS: 361351 | 12H11.005 | KSSQSVLSSSNNKNYLA | WTSTRDS | QQYYRTPWT |
| | | SEQ ID NO: 742 | SEQ ID NO: 899 | SEQ ID NO: 1056 |
| iPS: 361358 | 12H11.006 | KSSQSVLSSSNNKNYLA | WTSTRDS | QQYYRTPWT |
| | | SEQ ID NO: 743 | SEQ ID NO: 900 | SEQ ID NO: 1057 |
| iPS: 361365 | 12H11.007 | KSSQSVLSSSNNKNYLA | WTSTRDS | QQYYRTPWT |
| | | SEQ ID NO: 744 | SEQ ID NO: 901 | SEQ ID NO: 1058 |
| iPS: 361372 | 12H11.008 | KSSQSVLSSSNNKNYLA | WTSTRDS | QQYYRTPWT |
| | | SEQ ID NO: 745 | SEQ ID NO: 902 | SEQ ID NO: 1059 |
| iPS: 361379 | 12H11.009 | KSSQSVLSSSNNKNYLA | WTSTRES | QQYYRTPWT |
| | | SEQ ID NO: 746 | SEQ ID NO: 903 | SEQ ID NO: 1060 |
| iPS: 361383 | 12H11.010 | KSSQSVLSSSNNKNYLA | WTSTRES | QQYYRTPWT |
| | | SEQ ID NO: 747 | SEQ ID NO: 904 | SEQ ID NO: 1061 |
| iPS: 361387 | 12H11.011 | KSSQSVLSSSNNKNYLA | WTSTRES | QQYYRTPWT |
| | | SEQ ID NO: 748 | SEQ ID NO: 905 | SEQ ID NO: 1062 |
| iPS: 361391 | 12H11.012 | KSSQSVLSSSNNKNYLA | WTSTRES | QQYYRTPWT |
| | | SEQ ID NO: 749 | SEQ ID NO: 906 | SEQ ID NO: 1063 |
| iPS: 361395 | 12H11.013 | KSSQSVLSSSNNKNYLA | WTSTRDS | QQYYRTPWT |
| | | SEQ ID NO: 750 | SEQ ID NO: 907 | SEQ ID NO: 1064 |
| iPS: 361402 | 12H11.014 | KSSQSVLSSSNNKNYLA | WTSTRES | QQYYRTPWT |
| | | SEQ ID NO: 751 | SEQ ID NO: 908 | SEQ ID NO: 1065 |
| iPS: 361406 | 2C2.005.001 | SGSSSNIGSQTVN | TNNQRPS | ATFDESLSGPV |
| | | SEQ ID NO: 752 | SEQ ID NO: 909 | SEQ ID NO: 1066 |
| iPS: 361412 | 2C2.005.002 | SGSSSNIGSQTVN | TNNQRPS | ATFDESLQGPV |
| | | SEQ ID NO: 753 | SEQ ID NO: 910 | SEQ ID NO: 1067 |
| iPS: 361418 | 2C2.005.003 | SGSSSNIGSNYVN | TNNQRPS | ATFDESLSGPV |
| | | SEQ ID NO: 754 | SEQ ID NO: 911 | SEQ ID NO: 1068 |
| iPS: 361424 | 2C2.005.004 | SGSSSNIGSNYVN | TNNQRPS | ATFDESLQGPV |
| | | SEQ ID NO: 755 | SEQ ID NO: 912 | SEQ ID NO: 1069 |
| iPS: 361430 | 2C2.005.005 | SGSSSNIGSQTVN | TNNQRPS | ATFDDSLNGPV |
| | | SEQ ID NO: 756 | SEQ ID NO: 913 | SEQ ID NO: 1070 |
| iPS: 361436 | 2C2.005.006 | SGSSSNIGSNYVN | TNNQRPS | ATFDDSLNGPV |
| | | SEQ ID NO: 757 | SEQ ID NO: 914 | SEQ ID NO: 1071 |
| iPS: 361442 | 2C2.005.007 | SGSSSNIGSNTVN | TNNQRPS | ATFDESLNGPV |
| | | SEQ ID NO: 758 | SEQ ID NO: 915 | SEQ ID NO: 1072 |
| iPS: 361448 | 2C2.005.008 | SGSSSNIGSNTVN | TNNQRPS | ATFDDSLQGPV |
| | | SEQ ID NO: 759 | SEQ ID NO: 916 | SEQ ID NO: 1073 |
| iPS: 361454 | 2C2.005.009 | SGSSSNIGSNTVN | TNNQRPS | ATFDDSLSGPV |
| | | SEQ ID NO: 760 | SEQ ID NO: 917 | SEQ ID NO: 1074 |
| iPS: 361460 | 2C2.005.010 | SGSSSNIGSNTVN | TNNQRPS | ATFDDSLNAPV |
| | | SEQ ID NO: 761 | SEQ ID NO: 918 | SEQ ID NO: 1075 |
| iPS: 361466 | 2C2.005.011 | SGSSSNIGSNTVN | TNNQRPS | ATFDSSLNGPV |
| | | SEQ ID NO: 762 | SEQ ID NO: 919 | SEQ ID NO: 1076 |
| iPS: 361472 | 2C2.005.012 | SGSSSNIGSNYVN | TNNQRPS | ATFDSSLNAPV |
| | | SEQ ID NO: 763 | SEQ ID NO: 920 | SEQ ID NO: 1077 |
| iPS: 361478 | 2C2.005.013 | SGSSSNIGSNYVN | TNNQRPS | ATFDSSLNAPV |
| | | SEQ ID NO: 764 | SEQ ID NO: 921 | SEQ ID NO: 1078 |
| iPS: 361485 | 2C2.005.014 | SGSSSNIGSQTVN | TNNQRPS | ATFDESLSGPV |
| | | SEQ ID NO: 765 | SEQ ID NO: 922 | SEQ ID NO: 1079 |
| iPS: 361845 | 18F2.013 | RASQDLRNYLG | GASSLQS | LQHNNYPFT |
| | | SEQ ID NO: 766 | SEQ ID NO: 923 | SEQ ID NO: 1080 |
| iPS: 361851 | 6H1.009 | RASQDIRDYLG | GASSLQS | LQHNNYPFT |
| | | SEQ ID NO: 767 | SEQ ID NO: 924 | SEQ ID NO: 1081 |
| iPS: 361855 | 2C2.005.015 | SGSSSNIGSNTVN | TNNQRPS | ATFDSSLSGPV |
| | | SEQ ID NO: 768 | SEQ ID NO: 925 | SEQ ID NO: 1082 |
| iPS: 336067 | 5G12.006 | RASQTISRFLN | VASSLQS | QQSYSTLIS |
| | | SEQ ID NO: 769 | SEQ ID NO: 926 | SEQ ID NO: 1083 |
| iPS: 336169 | 17B11.002 | SGSSSNIGNNYVS | DNNKRPS | GTWDSSLSAVV |
| | | SEQ ID NO: 770 | SEQ ID NO: 927 | SEQ ID NO: 1084 |
| iPS: 361127 | 5G12.006.001 | RASQTISRFLN | VASSLQS | QQSYSTLIS |
| | | SEQ ID NO: 771 | SEQ ID NO: 928 | SEQ ID NO: 1085 |
| iPS: 361136 | 5G12.006.002 | RASQTISRFLN | VASSLQS | QQSYSTLIS |
| | | SEQ ID NO: 772 | SEQ ID NO: 929 | SEQ ID NO: 1086 |
| iPS: 361140 | 5G12.006.003 | RASQTISRFLN | VASSLQS | QQSYSTLIS |
| | | SEQ ID NO: 773 | SEQ ID NO: 930 | SEQ ID NO: 1087 |
| iPS: 359919 | 5G12.006.004 | RASQTISRFLN | VASSLQS | QQSYSTLIS |
| | | SEQ ID NO: 774 | SEQ ID NO: 931 | SEQ ID NO: 1088 |
| iPS: 361144 | 5G12.006.005 | RASQTISRFLN | VASSLQS | QQSYSTLIS |
| | | SEQ ID NO: 775 | SEQ ID NO: 932 | SEQ ID NO: 1089 |
| iPS: 361151 | 5G12.006.006 | RASQTISRFLN | VASSLQS | QQSYSTLIS |
| | | SEQ ID NO: 776 | SEQ ID NO: 933 | SEQ ID NO: 1090 |
| iPS: 361491 | 17B11.002.001 | SGSSSNIGNNYVS | DNNKRPS | GTWDSSLSAVV |
| | | SEQ ID NO: 777 | SEQ ID NO: 934 | SEQ ID NO: 1091 |
| iPS: 361499 | 17B11.002.002 | SGSSSNIGNNYVS | DNNKRPS | GTWDSSLSAVV |
| | | SEQ ID NO: 778 | SEQ ID NO: 935 | SEQ ID NO: 1092 |
| iPS: 361503 | 17B11.002.003 | SGSSSNIGNNYVS | DNNKRPS | GTWDSSLSAVV |
| | | SEQ ID NO: 779 | SEQ ID NO: 936 | SEQ ID NO: 1093 |
| iPS: 361507 | 17B11.002.004 | SGSSSNIGNNYVS | DNNKRPS | GTFESSLSAVV |
| | | SEQ ID NO: 780 | SEQ ID NO: 937 | SEQ ID NO: 1094 |
| iPS: 361514 | 17B11.002.005 | SGSSSNIGNNYVS | DNNKRPS | GTWDSSLSAVV |
| | | SEQ ID NO: 781 | SEQ ID NO: 938 | SEQ ID NO: 1095 |
| iPS: 360582 | 17B11.002.006 | SGSSSNIGNNYVS | DNNKRPS | GTWDSSLSAVV |
| | | SEQ ID NO: 782 | SEQ ID NO: 939 | SEQ ID NO: 1096 |
| iPS: 361518 | 17B11.002.007 | SGSSSNIGNNYVS | DNNKRPS | GTWDSSLSAVV |
| | | SEQ ID NO: 783 | SEQ ID NO: 940 | SEQ ID NO: 1097 |
| iPS: 360570 | 17B11.002.008 | SGSSSNIGNNYVS | DNNKRPS | GTFESSLSAVV |
| | | SEQ ID NO: 784 | SEQ ID NO: 941 | SEQ ID NO: 1098 |
| iPS: 362051 | 5G12.005.001 | RASQTISRFLN | VASSLQS | QQSYSTLLS |
| | | SEQ ID NO: 785 | SEQ ID NO: 942 | SEQ ID NO: 1099 |

TABLE 13
CDRH1, CDRH2, and CDRH3 Amino Acid Sequences of Example Anti-GIPR Antibodies

| Identifier | Construct | CDRH1 | CDRH2 | CDRH3 |
|---|---|---|---|---|
| iPS: 336175 | 2C2.005 | GYYMH | WINPNSGGTNYAQKFQG | GGDYVWGTYRPHYYYGMDV |
| | | SEQ ID NO: 1100 | SEQ ID NO: 1257 | SEQ ID NO: 1414 |
| iPS: 335914 | 4B1 | NFGMH | VIWYDGSNENYADSVKG | DGTIFGVVLGDY |
| | | SEQ ID NO: 1101 | SEQ ID NO: 1258 | SEQ ID NO: 1415 |
| iPS: 335938 | 6H1 | YFGMH | VIWYDGSNKYYADSVKG | DGTIFGVLLGDY |
| | | SEQ ID NO: 1102 | SEQ ID NO: 1259 | SEQ ID NO: 1416 |
| iPS: 335941 | 2F11 | SYGMH | VIWYDGSNKYYADSVKG | DRTIFGVVLDY |
| | | SEQ ID NO: 1103 | SEQ ID NO: 1260 | SEQ ID NO: 1417 |
| iPS: 335970 | 5C2 | GYYIH | WINPDSGGTDYSQRFQG | EATIFGMVIVPFDY |
| | | SEQ ID NO: 1104 | SEQ ID NO: 1261 | SEQ ID NO: 1418 |
| iPS: 335978 | 13H12 | GYYIH | WINPDSGGTDYSQRFQG | EATIFGMVIVPFDY |
| | | SEQ ID NO: 1105 | SEQ ID NO: 1262 | SEQ ID NO: 1419 |
| iPS: 335986 | 11C1 | GYYIH | WISPNSGDTSYAQKFQD | EATIFGMLIVPFDY |
| | | SEQ ID NO: 1106 | SEQ ID NO: 1263 | SEQ ID NO: 1420 |
| iPS: 335994 | 12H11 | GYYIH | WISPNNGDTNYAQKFQD | EATIFGMLIVPFDY |
| | | SEQ ID NO: 1107 | SEQ ID NO: 1264 | SEQ ID NO: 1421 |
| iPS: 336024 | 18E3 | SGGYYWS | YIYYSGSTYYNPSLKS | DRITIFGVVMGGGMDV |
| | | SEQ ID NO: 1108 | SEQ ID NO: 1265 | SEQ ID NO: 1422 |
| iPS: 336041 | 2G10_LC1 | NYGMH | AIWFDGSDKYYADSVKG | DQAIFGVVPDY |
| | | SEQ ID NO: 1109 | SEQ ID NO: 1266 | SEQ ID NO: 1423 |
| iPS: 336077 | 4H9.004 | YFGMH | VIWYDGSNKYYADSVKG | DGTIFGVLLGDY |
| | | SEQ ID NO: 1110 | SEQ ID NO: 1267 | SEQ ID NO: 1424 |
| iPS: 336088 | 6A5.004 | SYGMH | AIWYDGNNKYYADSVKG | DRTIFGVVLEY |
| | | SEQ ID NO: 1111 | SEQ ID NO: 1268 | SEQ ID NO: 1425 |
| iPS: 336099 | 17H11.004 | SYYWS | RIYTSGSTNYNPSLKS | DVAVAGFDY |
| | | SEQ ID NO: 1112 | SEQ ID NO: 1269 | SEQ ID NO: 1426 |
| iPS: 359621 | 17H11.004.001 | SYYWS | RIYTSGSTNYNPSLKS | DVAVAGFDY |
| | | SEQ ID NO: 1113 | SEQ ID NO: 1270 | SEQ ID NO: 1427 |
| iPS: 359781 | 4H9.004.001 | YFGMH | VIWYDASNKYYADAVKG | DGTIFGVLLGDY |
| | | SEQ ID NO: 1114 | SEQ ID NO: 1271 | SEQ ID NO: 1428 |
| iPS: 360929 | 4H9.004.002 | YFGMH | VIWYDASNKYYADSVKG | DGTIFGVLLGDY |
| | | SEQ ID NO: 1115 | SEQ ID NO: 1272 | SEQ ID NO: 1429 |
| iPS: 360936 | 4H9.004.003 | YFGMH | VIWYDGSNKYYADAVKG | DGTIFGVLLGDY |
| | | SEQ ID NO: 1116 | SEQ ID NO: 1273 | SEQ ID NO: 1430 |
| iPS: 360943 | 4H9.004.004 | YFGMH | VIWYDASNKYYADAVKG | DGTIFGVLLGDY |
| | | SEQ ID NO: 1117 | SEQ ID NO: 1274 | SEQ ID NO: 1431 |
| iPS: 360949 | 4H9.004.005 | YFGMH | VIWYDASNKYYADAVKG | DGTIFGVLLGDY |
| | | SEQ ID NO: 1118 | SEQ ID NO: 1275 | SEQ ID NO: 1432 |
| iPS: 359761 | 4H9.004.006 | YFGMH | VIWYDASNKYYADAVKG | DRTIFGVLLGDY |
| | | SEQ ID NO: 1119 | SEQ ID NO: 1276 | SEQ ID NO: 1433 |
| iPS: 360955 | 4B1.010 | NFGMH | VIWYDASNENYADAVKG | DGTIFGVVLGDY |
| | | SEQ ID NO: 1120 | SEQ ID NO: 1277 | SEQ ID NO: 1434 |
| iPS: 360962 | 4B1.011 | NFGMH | VIWYDASNENYADAVKG | DGTIFGVVLGDY |
| | | SEQ ID NO: 1121 | SEQ ID NO: 1278 | SEQ ID NO: 1435 |
| iPS: 360968 | 4B1.012 | NFGMH | VIWYDASNENYADAVKG | DGTIFGVVLGDY |
| | | SEQ ID NO: 1122 | SEQ ID NO: 1279 | SEQ ID NO: 1436 |
| iPS: 360974 | 4B1.013 | NFGMH | VIWYDASNENYADSVKG | DGTIFGVVLGDY |
| | | SEQ ID NO: 1123 | SEQ ID NO: 1280 | SEQ ID NO: 1437 |
| iPS: 360978 | 4B1.014 | NFGMH | VIWYDGSNENYADAVKG | DGTIFGVVLGDY |
| | | SEQ ID NO: 1124 | SEQ ID NO: 1281 | SEQ ID NO: 1438 |
| iPS: 359785 | 4B1.015 | NFGMH | VIWYDASNENYADAVKG | DRTIFGVVLGDY |
| | | SEQ ID NO: 1125 | SEQ ID NO: 1282 | SEQ ID NO: 1439 |
| iPS: 360982 | 4B1.016 | NFGMH | VIWYDASNENYADAVKG | DGTIFGVVLGDY |
| | | SEQ ID NO: 1126 | SEQ ID NO: 1283 | SEQ ID NO: 1440 |
| iPS: 335922 | 18F2 | NFGMH | VIWYDGSNENYADSVKG | DGTIFGVVLGDY |
| | | SEQ ID NO: 1127 | SEQ ID NO: 1284 | SEQ ID NO: 1441 |
| iPS: 360986 | 18F2.002 | NFGMH | VIWYDASNENYADAVKG | DGTIFGVVLGDY |
| | | SEQ ID NO: 1128 | SEQ ID NO: 1285 | SEQ ID NO: 1442 |
| iPS: 360995 | 18F2.003 | NFGMH | VIWYDASNENYADAVKG | DGTIFGVVLGDY |
| | | SEQ ID NO: 1129 | SEQ ID NO: 1286 | SEQ ID NO: 1443 |
| iPS: 360999 | 18F2.004 | NFGMH | VIWYDASNENYADAVKG | DGTIFGVVLGDY |
| | | SEQ ID NO: 1130 | SEQ ID NO: 1287 | SEQ ID NO: 1444 |
| iPS: 361005 | 18F2.005 | NFGMH | VIWYDASNENYADAVKG | DGTIFGVVLGDY |
| | | SEQ ID NO: 1131 | SEQ ID NO: 1288 | SEQ ID NO: 1445 |
| iPS: 361009 | 18F2.006 | NFGMH | VIWYDASNENYADAVKG | DGTIFGVVLGDY |
| | | SEQ ID NO: 1132 | SEQ ID NO: 1289 | SEQ ID NO: 1446 |
| iPS: 361013 | 18F2.007 | NFGMH | VIWYDASNENYADAVKG | DGTIFGVVLGDY |
| | | SEQ ID NO: 1133 | SEQ ID NO: 1290 | SEQ ID NO: 1447 |
| iPS: 361017 | 18F2.008 | NFGMH | VIWYDASNENYADAVKG | DGTIFGVVLGDY |
| | | SEQ ID NO: 1134 | SEQ ID NO: 1291 | SEQ ID NO: 1448 |
| iPS: 361021 | 18F2.009 | NFGMH | VIWYDGSNENYADAVKG | DGTIFGVVLGDY |
| | | SEQ ID NO: 1135 | SEQ ID NO: 1292 | SEQ ID NO: 1449 |
| iPS: 361028 | 18F2.010 | NFGMH | VIWYDASNENYADSVKG | DGTIFGVVLGDY |
| | | SEQ ID NO: 1136 | SEQ ID NO: 1293 | SEQ ID NO: 1450 |
| iPS: 360535 | 18F2.011 | NFGMH | VIWYDASNENYADAVKG | DRTIFGVVLGDY |
| | | SEQ ID NO: 1137 | SEQ ID NO: 1294 | SEQ ID NO: 1451 |
| iPS: 361035 | 18F2.012 | NFGMH | VIWYDASNENYADAVKG | DGTIFGVVLGDY |
| | | SEQ ID NO: 1138 | SEQ ID NO: 1295 | SEQ ID NO: 1452 |
| iPS: 359940 | 2F11.002 | SYGMH | VIWYDASNKYYADAVKG | DRTIFGVVLDY |
| | | SEQ ID NO: 1139 | SEQ ID NO: 1296 | SEQ ID NO: 1453 |
| iPS: 361039 | 2F11.003 | SYGMH | VIWYDASNKYYADAVKG | DRTIFGVVLDY |
| | | SEQ ID NO: 1140 | SEQ ID NO: 1297 | SEQ ID NO: 1454 |
| iPS: 361043 | 2F11.004 | SYGMH | VIWYDASNKYYADAVKG | DRTIFGVVLDY |
| | | SEQ ID NO: 1141 | SEQ ID NO: 1298 | SEQ ID NO: 1455 |
| iPS: 361049 | 2F11.005 | SYGMH | VIWYDASNKYYADAVKG | DRTIFGVVLDY |
| | | SEQ ID NO: 1142 | SEQ ID NO: 1299 | SEQ ID NO: 1456 |
| iPS: 361055 | 2F11.006 | SYGMH | VIWYDASNKYYADAVKG | DRTIFGVVLDY |
| | | SEQ ID NO: 1143 | SEQ ID NO: 1300 | SEQ ID NO: 1457 |
| iPS: 361059 | 2F11.007 | SYGMH | VIWYDASNKYYADAVKG | DRTIFGVVLDY |
| | | SEQ ID NO: 1144 | SEQ ID NO: 1301 | SEQ ID NO: 1458 |
| iPS: 361063 | 2F11.008 | SYGMH | VIWYDASNKYYADAVKG | DRTIFGVVLDY |
| | | SEQ ID NO: 1145 | SEQ ID NO: 1302 | SEQ ID NO: 1459 |
| iPS: 359949 | 2F11.009 | SYGMH | VIWYDASNKYYADSVKG | DRTIFGVVLDY |
| | | SEQ ID NO: 1146 | SEQ ID NO: 1303 | SEQ ID NO: 1460 |
| iPS: 359956 | 2F11.010 | SYGMH | VIWYDGSNKYYADAVKG | DRTIFGVVLDY |
| | | SEQ ID NO: 1147 | SEQ ID NO: 1304 | SEQ ID NO: 1461 |
| iPS: 359865 | 6H1.002 | YFGMH | VIWYDASNKYYADAVKG | DGTIFGVLLGDY |
| | | SEQ ID NO: 1148 | SEQ ID NO: 1305 | SEQ ID NO: 1462 |
| iPS: 359869 | 6H1.003 | YFGMH | VIWYDASNKYYADAVKG | DRTIFGVLLGDY |
| | | SEQ ID NO: 1149 | SEQ ID NO: 1306 | SEQ ID NO: 1463 |
| iPS: 359873 | 6H1.004 | YFGMH | VIWYDASNKYYADAVKG | DGTIFGVLLGDY |
| | | SEQ ID NO: 1150 | SEQ ID NO: 1307 | SEQ ID NO: 1464 |
| iPS: 359877 | 6H1.005 | YFGMH | VIWYDASNKYYADAVKG | DRTIFGVLLGDY |
| | | SEQ ID NO: 1151 | SEQ ID NO: 1308 | SEQ ID NO: 1465 |
| iPS: 361067 | 6H1.006 | YFGMH | VIWYDGSNKYYADSVKG | DGTIFGVLLGDY |
| | | SEQ ID NO: 1152 | SEQ ID NO: 1309 | SEQ ID NO: 1466 |
| iPS: 361071 | 6H1.007 | YFGMH | VIWYDASNKYYADSVKG | DGTIFGVLLGDY |
| | | SEQ ID NO: 1153 | SEQ ID NO: 1310 | SEQ ID NO: 1467 |
| iPS: 361075 | 6H1.008 | YFGMH | VIWYDGSNKYYADAVKG | DGTIFGVLLGDY |
| | | SEQ ID NO: 1154 | SEQ ID NO: 1311 | SEQ ID NO: 1468 |
| iPS: 361079 | 6A5.004.001 | SYGMH | AIWYDANNKYYADAVKG | DRTIFGVVLEY |
| | | SEQ ID NO: 1155 | SEQ ID NO: 1312 | SEQ ID NO: 1469 |
| iPS: 361085 | 6A5.004.002 | SYGMH | AIWYDANNKYYADAVKG | DRTIFGVVLEY |
| | | SEQ ID NO: 1156 | SEQ ID NO: 1313 | SEQ ID NO: 1470 |
| iPS: 361091 | 6A5.004.003 | SYGMH | AIWYDANNKYYADAVKG | DRTIFGVVLEY |
| | | SEQ ID NO: 1157 | SEQ ID NO: 1314 | SEQ ID NO: 1471 |
| iPS: 361095 | 6A5.004.004 | SYGMH | AIWYDANNKYYADAVKG | DRTIFGVVLEY |
| | | SEQ ID NO: 1158 | SEQ ID NO: 1315 | SEQ ID NO: 1472 |
| iPS: 361101 | 6A5.004.005 | SYGMH | AIWYDANNKYYADAVKG | DRTIFGVVLEY |
| | | SEQ ID NO: 1159 | SEQ ID NO: 1316 | SEQ ID NO: 1473 |
| iPS: 361105 | 6A5.004.006 | SYGMH | AIWYDANNKYYADAVKG | DRTIFGVVLEY |
| | | SEQ ID NO: 1160 | SEQ ID NO: 1317 | SEQ ID NO: 1474 |
| iPS: 361109 | 6A5.004.007 | SYGMH | AIWYDANNKYYADAVKG | DRTIFGVVLEY |
| | | SEQ ID NO: 1161 | SEQ ID NO: 1318 | SEQ ID NO: 1475 |
| iPS: 361113 | 6A5.004.008 | SYGMH | AIWYDGNNKYYADAVKG | DRTIFGVVLEY |
| | | SEQ ID NO: 1162 | SEQ ID NO: 1319 | SEQ ID NO: 1476 |
| iPS: 361120 | 6A5.004.009 | SYGMH | AIWYDANNKYYADSVKG | DRTIFGVVLEY |
| | | SEQ ID NO: 1163 | SEQ ID NO: 1320 | SEQ ID NO: 1477 |
| iPS: 359896 | 6A5.004.010 | SYGMH | AIWYDANNKYYADAVKG | DRTIFGVVLEY |
| | | SEQ ID NO: 1164 | SEQ ID NO: 1321 | SEQ ID NO: 1478 |
| iPS: 359890 | 6A5.004.011 | SYGMH | AIWYDANNKYYADAVKG | DRTIFGVVLEY |
| | | SEQ ID NO: 1165 | SEQ ID NO: 1322 | SEQ ID NO: 1479 |
| iPS: 359567 | 2A11.002 | SYGMH | VIWYDASNKYYEDAVKG | GITIFGHGFEY |
| | | SEQ ID NO: 1166 | SEQ ID NO: 1323 | SEQ ID NO: 1480 |
| iPS: 335965 | 2A11.003 | SYGMH | VIWYDGSNKYYEDSVKG | GITIFGHGFEY |
| | | SEQ ID NO: 1167 | SEQ ID NO: 1324 | SEQ ID NO: 1481 |
| iPS: 361158 | 2A11.004 | SYGMH | VIWYDGSNKYYEDAVKG | GITIFGHGFEY |
| | | SEQ ID NO: 1168 | SEQ ID NO: 1325 | SEQ ID NO: 1482 |
| iPS: 361165 | 2A11.005 | SYGMH | VIWYDASNKYYEDSVKG | GITIFGHGFEY |
| | | SEQ ID NO: 1169 | SEQ ID NO: 1326 | SEQ ID NO: 1483 |
| iPS: 361172 | 2G10_LC1.003 | NYGMH | AIWFDASDKYYADAVKG | DQAIFGVVPDY |
| | | SEQ ID NO: 1170 | SEQ ID NO: 1327 | SEQ ID NO: 1484 |
| iPS: 361178 | 2G10_LC1.004 | NYGMH | AIWFDASDKYYADSVKG | DQAIFGVVPDY |
| | | SEQ ID NO: 1171 | SEQ ID NO: 1328 | SEQ ID NO: 1485 |
| iPS: 361185 | 2G10_LC1.005 | NYGMH | AIWFDGSDKYYADAVKG | DQAIFGVVPDY |
| | | SEQ ID NO: 1172 | SEQ ID NO: 1329 | SEQ ID NO: 1486 |
| iPS: 361192 | 2G10_LC1.006 | NYGMH | AIWFDASDKYYADAVKG | DQAIFGVVPDY |
| | | SEQ ID NO: 1173 | SEQ ID NO: 1330 | SEQ ID NO: 1487 |
| iPS: 359609 | 2G10_LC1.007 | NYGMH | AIWFDASDKYYADAVKG | DQAIFGVVPDY |
| | | SEQ ID NO: 1174 | SEQ ID NO: 1331 | SEQ ID NO: 1488 |
| iPS: 359615 | 2G10_LC1.008 | NYGMH | AIWFDASDKYYADAVKG | DQAIFGVVPDY |
| | | SEQ ID NO: 1175 | SEQ ID NO: 1332 | SEQ ID NO: 1489 |
| iPS: 361196 | 2G10_LC1.009 | NYGMH | AIWFDASDKYYADAVKG | DQAIFGVVPDY |
| | | SEQ ID NO: 1176 | SEQ ID NO: 1333 | SEQ ID NO: 1490 |
| iPS: 361202 | 2G10_LC1.010 | NYGMH | AIWFDASDKYYADAVKG | DQAIFGVVPDY |
| | | SEQ ID NO: 1177 | SEQ ID NO: 1334 | SEQ ID NO: 1491 |
| iPS: 359644 | 18E3.002 | SGGYYWS | YIYYSGSTYYNPSLKS | DRITIFGVVMGGGMDV |
| | | SEQ ID NO: 1178 | SEQ ID NO: 1335 | SEQ ID NO: 1492 |
| iPS: 361206 | 18E3.003 | SGGYYWS | YIYYSGSTYYNPSLKS | DRITIFGVVMGGGMDV |
| | | SEQ ID NO: 1179 | SEQ ID NO: 1336 | SEQ ID NO: 1493 |
| iPS: 359628 | 18E3.004 | SGGYYWS | YIYYSGSTYYNPSLKS | DRITIFGVVMGGGMDV |
| | | SEQ ID NO: 1180 | SEQ ID NO: 1337 | SEQ ID NO: 1494 |
| iPS: 359637 | 18E3.005 | SGGYYWS | YIYYSGSTYYNPSLKS | DRITIFGVVMGGGMDV |
| | | SEQ ID NO: 1181 | SEQ ID NO: 1338 | SEQ ID NO: 1495 |
| iPS: 361210 | 18E3.006 | SGGYYWS | YIYYSGSTYYNPSLKS | DRITIFGVVMGGGMDV |
| | | SEQ ID NO: 1182 | SEQ ID NO: 1339 | SEQ ID NO: 1496 |
| iPS: 361214 | 18E3.007 | SGGYYWS | YIYYSGSTYYNPSLKS | DRITIFGVVMGGGMDV |
| | | SEQ ID NO: 1183 | SEQ ID NO: 1340 | SEQ ID NO: 1497 |
| iPS: 361218 | 18E3.008 | SGGYYWS | YIYYSGSTYYNPSLKS | DRITIFGVVMGGGMDV |
| | | SEQ ID NO: 1184 | SEQ ID NO: 1341 | SEQ ID NO: 1498 |
| iPS: 361222 | 5C2.006 | GYYIH | WINPESGGTDYSQRFQG | EATIFGMVIVPFDY |
| | | SEQ ID NO: 1185 | SEQ ID NO: 1342 | SEQ ID NO: 1499 |
| iPS: 361229 | 5C2.007 | GYYIH | WINPESGGTDYSQRFQG | EATIFGMVIVPFDY |
| | | SEQ ID NO: 1186 | SEQ ID NO: 1343 | SEQ ID NO: 1500 |
| iPS: 361236 | 5C2.008 | GYYIH | WINPDAGGTDYSQRFQG | EATIFGMVIVPFDY |
| | | SEQ ID NO: 1187 | SEQ ID NO: 1344 | SEQ ID NO: 1501 |
| iPS: 359685 | 5C2.009 | GYYIH | WINPDAGGTDYSQRFQG | EATIFGMVIVPFDY |
| | | SEQ ID NO: 1188 | SEQ ID NO: 1345 | SEQ ID NO: 1502 |
| iPS: 361240 | 5C2.010 | GYYIH | WINPDSGGTDYSQRFQG | EATIFGMVIVPFDY |
| | | SEQ ID NO: 1189 | SEQ ID NO: 1346 | SEQ ID NO: 1503 |
| iPS: 361247 | 5C2.011 | GYYIH | WINPDSGGTDYSQRFQG | EATIFGMVIVPFDY |
| | | SEQ ID NO: 1190 | SEQ ID NO: 1347 | SEQ ID NO: 1504 |
| iPS: 361254 | 5C2.012 | GYYIH | WINPDSGGTDYSQRFQG | EATIFGMVIVPFDY |
| | | SEQ ID NO: 1191 | SEQ ID NO: 1348 | SEQ ID NO: 1505 |
| iPS: 361261 | 5C2.013 | GYYIH | WINPDAGGTDYSQRFQG | EATIFGMVIVPFDY |
| | | SEQ ID NO: 1192 | SEQ ID NO: 1349 | SEQ ID NO: 1506 |
| iPS: 361268 | 5C2.014 | GYYIH | WINPDAGGTDYSQRFQG | EATIFGMVIVPFDY |
| | | SEQ ID NO: 1193 | SEQ ID NO: 1350 | SEQ ID NO: 1507 |
| iPS: 359669 | 5C2.015 | GYYIH | WINPDAGGTDYSQRFQG | EATIFGMVIVPFDY |
| | | SEQ ID NO: 1194 | SEQ ID NO: 1351 | SEQ ID NO: 1508 |
| iPS: 359678 | 5C2.016 | GYYIH | WINPESGGTDYSQRFQG | EATIFGMVIVPFDY |
| | | SEQ ID NO: 1195 | SEQ ID NO: 1352 | SEQ ID NO: 1509 |
| iPS: 361275 | 11C1.002 | GYYIH | WISPNSGETSYAQKFQD | EATIFGMLIVPFDY |
| | | SEQ ID NO: 1196 | SEQ ID NO: 1353 | SEQ ID NO: 1510 |
| iPS: 361282 | 11C1.003 | GYYIH | WISPNSGDTSYAQKFQD | EATIFGMLIVPFDY |
| | | SEQ ID NO: 1197 | SEQ ID NO: 1354 | SEQ ID NO: 1511 |
| iPS: 361289 | 11C1.004 | GYYIH | WISPNSGETSYAQKFQD | EATIFGMLIVPFDY |
| | | SEQ ID NO: 1198 | SEQ ID NO: 1355 | SEQ ID NO: 1512 |
| iPS: 359712 | 11C1.005 | GYYIH | WISPNSGETSYAQKFQD | EATIFGMLIVPFDY |
| | | SEQ ID NO: 1199 | SEQ ID NO: 1356 | SEQ ID NO: 1513 |
| iPS: 361293 | 11C1.006 | GYYIH | WISPNSGDTSYAQKFQD | EATIFGMLIVPFDY |
| | | SEQ ID NO: 1200 | SEQ ID NO: 1357 | SEQ ID NO: 1514 |
| iPS: 361297 | 11C1.007 | GYYIH | WISPNSGETSYAQKFQD | EATIFGMLIVPFDY |
| | | SEQ ID NO: 1201 | SEQ ID NO: 1358 | SEQ ID NO: 1515 |
| iPS: 361301 | 11C1.008 | GYYIH | WISPNSGDTSYAQKFQD | EATIFGMLIVPFDY |
| | | SEQ ID NO: 1202 | SEQ ID NO: 1359 | SEQ ID NO: 1516 |
| iPS: 359703 | 11C1.009 | GYYIH | WISPNSGETSYAQKFQD | EATIFGMLIVPFDY |
| | | SEQ ID NO: 1203 | SEQ ID NO: 1360 | SEQ ID NO: 1517 |
| iPS: 361305 | 11C1.010 | GYYIH | WISPNSGETSYAQKFQD | EATIFGMLIVPFDY |
| | | SEQ ID NO: 1204 | SEQ ID NO: 1361 | SEQ ID NO: 1518 |
| iPS: 361312 | 13H12.002 | GYYIH | WINPESGGTDYSQRFQG | EATIFGMVIVPFDY |
| | | SEQ ID NO: 1205 | SEQ ID NO: 1362 | SEQ ID NO: 1519 |
| iPS: 359744 | 13H12.003 | GYYIH | WINPESGGTDYSQRFQG | EATIFGMVIVPFDY |
| | | SEQ ID NO: 1206 | SEQ ID NO: 1363 | SEQ ID NO: 1520 |
| iPS: 361319 | 13H12.004 | GYYIH | WINPDSGGTDYSQRFQG | EATIFGMVIVPFDY |
| | | SEQ ID NO: 1207 | SEQ ID NO: 1364 | SEQ ID NO: 1521 |
| iPS: 359737 | 13H12.005 | GYYIH | WINPESGGTDYSQRFQG | EATIFGMVIVPFDY |
| | | SEQ ID NO: 1208 | SEQ ID NO: 1365 | SEQ ID NO: 1522 |
| iPS: 361326 | 13H12.006 | GYYIH | WINPESGGTDYSQRFQG | EATIFGMVIVPFDY |
| | | SEQ ID NO: 1209 | SEQ ID NO: 1366 | SEQ ID NO: 1523 |
| iPS: 361330 | 12H11.002 | GYYIH | WISPNQGETNYAQKFQD | EATIFGMLIVPFDY |
| | | SEQ ID NO: 1210 | SEQ ID NO: 1367 | SEQ ID NO: 1524 |
| iPS: 361337 | 12H11.003 | GYYIH | WISPNQGDTNYAQKFQD | EATIFGMLIVPFDY |
| | | SEQ ID NO: 1211 | SEQ ID NO: 1368 | SEQ ID NO: 1525 |
| iPS: 361344 | 12H11.004 | GYYIH | WISPNQGETNYAQKFQD | EATIFGMLIVPFDY |
| | | SEQ ID NO: 1212 | SEQ ID NO: 1369 | SEQ ID NO: 1526 |
| iPS: 361351 | 12H11.005 | GYYIH | WISPNNGETNYAQKFQD | EATIFGMLIVPFDY |
| | | SEQ ID NO: 1213 | SEQ ID NO: 1370 | SEQ ID NO: 1527 |
| iPS: 361358 | 12H11.006 | GYYIH | WISPNNGDTNYAQKFQD | EATIFGMLIVPFDY |
| | | SEQ ID NO: 1214 | SEQ ID NO: 1371 | SEQ ID NO: 1528 |
| iPS: 361365 | 12H11.007 | GYYIH | WISPNQGDTNYAQKFQD | EATIFGMLIVPFDY |
| | | SEQ ID NO: 1215 | SEQ ID NO: 1372 | SEQ ID NO: 1529 |
| iPS: 361372 | 12H11.008 | GYYIH | WISPNNGETNYAQKFQD | EATIFGMLIVPFDY |
| | | SEQ ID NO: 1216 | SEQ ID NO: 1373 | SEQ ID NO: 1530 |
| iPS: 361379 | 12H11.009 | GYYIH | WISPNQGETNYAQKFQD | EATIFGMLIVPFDY |
| | | SEQ ID NO: 1217 | SEQ ID NO: 1374 | SEQ ID NO: 1531 |
| iPS: 361383 | 12H11.010 | GYYIH | WISPNNGDTNYAQKFQD | EATIFGMLIVPFDY |
| | | SEQ ID NO: 1218 | SEQ ID NO: 1375 | SEQ ID NO: 1532 |
| iPS: 361387 | 12H11.011 | GYYIH | WISPNQGDTNYAQKFQD | EATIFGMLIVPFDY |
| | | SEQ ID NO: 1219 | SEQ ID NO: 1376 | SEQ ID NO: 1533 |
| iPS: 361391 | 12H11.012 | GYYIH | WISPNNGETNYAQKFQD | EATIFGMLIVPFDY |
| | | SEQ ID NO: 1220 | SEQ ID NO: 1377 | SEQ ID NO: 1534 |
| iPS: 361395 | 12H11.013 | GYYIH | WISPNQGETNYAQKFQD | EATIFGMLIVPFDY |
| | | SEQ ID NO: 1221 | SEQ ID NO: 1378 | SEQ ID NO: 1535 |
| iPS: 361402 | 12H11.014 | GYYIH | WISPNQGETNYAQKFQD | EATIFGMLIVPFDY |
| | | SEQ ID NO: 1222 | SEQ ID NO: 1379 | SEQ ID NO: 1536 |
| iPS: 361406 | 2C2.005.001 | GYYMH | WINPNSGGTNYAQKFQG | GGDYVWGTYRPHYYYGMDV |
| | | SEQ ID NO: 1223 | SEQ ID NO: 1380 | SEQ ID NO: 1537 |
| iPS: 361412 | 2C2.005.002 | GYYMH | WINPNSGGTNYAQKFQG | GGDYVWGTYRPHYYYGMDV |
| | | SEQ ID NO: 1224 | SEQ ID NO: 1381 | SEQ ID NO: 1538 |
| iPS: 361418 | 2C2.005.003 | GYYMH | WINPNSGGTNYAQKFQG | GGDYVWGTYRPHYYYGMDV |
| | | SEQ ID NO: 1225 | SEQ ID NO: 1382 | SEQ ID NO: 1539 |
| iPS: 361424 | 2C2.005.004 | GYYMH | WINPNSGGTNYAQKFQG | GGDYVWGTYRPHYYYGMDV |
| | | SEQ ID NO: 1226 | SEQ ID NO: 1383 | SEQ ID NO: 1540 |
| iPS: 361430 | 2C2.005.005 | GYYMH | WINPNSGGTNYAQKFQG | GGDYVWGTYRPHYYYGMDV |
| | | SEQ ID NO: 1227 | SEQ ID NO: 1384 | SEQ ID NO: 1541 |
| iPS: 361436 | 2C2.005.006 | GYYMH | WINPNSGGTNYAQKFQG | GGDYVWGTYRPHYYYGMDV |
| | | SEQ ID NO: 1228 | SEQ ID NO: 1385 | SEQ ID NO: 1542 |
| iPS: 361442 | 2C2.005.007 | GYYMH | WINPNSGGTNYAQKFQG | GGDYVWGTYRPHYYYGMDV |
| | | SEQ ID NO: 1229 | SEQ ID NO: 1386 | SEQ ID NO: 1543 |
| iPS: 361448 | 2C2.005.008 | GYYMH | WINPNSGGTNYAQKFQG | GGDYVWGTYRPHYYYGMDV |
| | | SEQ ID NO: 1230 | SEQ ID NO: 1387 | SEQ ID NO: 1544 |
| iPS: 361454 | 2C2.005.009 | GYYMH | WINPNSGGTNYAQKFQG | GGDYVWGTYRPHYYYGMDV |
| | | SEQ ID NO: 1231 | SEQ ID NO: 1388 | SEQ ID NO: 1545 |
| iPS: 361460 | 2C2.005.010 | GYYMH | WINPNSGGTNYAQKFQG | GGDYVWGTYRPHYYYGMDV |
| | | SEQ ID NO: 1232 | SEQ ID NO: 1389 | SEQ ID NO: 1546 |
| iPS: 361466 | 2C2.005.011 | GYYMH | WINPNSGGTNYAQKFQG | GGDYVWGTYRPHYYYGMDV |
| | | SEQ ID NO: 1233 | SEQ ID NO: 1390 | SEQ ID NO: 1547 |
| iPS: 361472 | 2C2.005.012 | GYYMH | WINPNSGGTNYAQKFQG | GGDYVWGTYRPHYYYGMDV |
| | | SEQ ID NO: 1234 | SEQ ID NO: 1391 | SEQ ID NO: 1548 |
| iPS: 361478 | 2C2.005.013 | GYYMH | WINPNSGGTNYAQKFQG | GGDYVFGTYRPHYYYGMDV |
| | | SEQ ID NO: 1235 | SEQ ID NO: 1392 | SEQ ID NO: 1549 |
| iPS: 361485 | 2C2.005.014 | GYYMH | WINPNSGGTNYAQKFQG | GGDYVFGTYRPHYYYGMDV |
| | | SEQ ID NO: 1236 | SEQ ID NO: 1393 | SEQ ID NO: 1550 |
| iPS: 361845 | 18F2.013 | NFGMH | VIWYDASNENYADAVKG | DRTIFGVVLGDY |
| | | SEQ ID NO: 1237 | SEQ ID NO: 1394 | SEQ ID NO: 1551 |
| iPS: 361851 | 6H1.009 | YFGMH | VIWYDASNKYYADAVKG | DRTIFGVLLGDY |
| | | SEQ ID NO: 1238 | SEQ ID NO: 1395 | SEQ ID NO: 1552 |
| iPS: 361855 | 2C2.005.015 | GYYMH | WINPNSGGTNYAQKFQG | GGDYVWGTYRPHYYYGMDV |
| | | SEQ ID NO: 1239 | SEQ ID NO: 1396 | SEQ ID NO: 1553 |
| iPS: 336067 | 5G12.006 | SYGIH | VIWYDGSNKFHADSVKG | GKVAGMPEAFEI |
| | | SEQ ID NO: 1240 | SEQ ID NO: 1397 | SEQ ID NO: 1554 |
| iPS: 336169 | 17B11.002 | SYDIN | WMNPNSGNTGYAQKFQG | GGDYVWGSYRPYYYYYGMDV |
| | | SEQ ID NO: 1241 | SEQ ID NO: 1398 | SEQ ID NO: 1555 |
| iPS: 361127 | 5G12.006.001 | SYGIH | VIWYDASNKFHADAVKG | GKVAGMPEAFEI |
| | | SEQ ID NO: 1242 | SEQ ID NO: 1399 | SEQ ID NO: 1556 |
| iPS: 361136 | 5G12.006.002 | SYGIH | VIWYDASNKFHADAVKG | GKVAGMPEAFEI |
| | | SEQ ID NO: 1243 | SEQ ID NO: 1400 | SEQ ID NO: 1557 |
| iPS: 361140 | 5G12.006.003 | SYGIH | VIWYDASNKFHADAVKG | GKVAGMPEAFEI |
| | | SEQ ID NO: 1244 | SEQ ID NO: 1401 | SEQ ID NO: 1558 |
| iPS: 359919 | 5G12.006.004 | SYGIH | VIWYDASNKFHADAVKG | GKVAGMPEAFEI |
| | | SEQ ID NO: 1245 | SEQ ID NO: 1402 | SEQ ID NO: 1559 |
| iPS: 361144 | 5G12.006.005 | SYGIH | VIWYDASNKFHADSVKG | GKVAGMPEAFEI |
| | | SEQ ID NO: 1246 | SEQ ID NO: 1403 | SEQ ID NO: 1560 |
| iPS: 361151 | 5G12.006.006 | SYGIH | VIWYDGSNKFHADAVKG | GKVAGMPEAFEI |
| | | SEQ ID NO: 1247 | SEQ ID NO: 1404 | SEQ ID NO: 1561 |
| iPS: 361491 | 17B11.002.001 | SYDIN | WMNPNSGGTGYAQKFQG | GGDYVWGSYRPYYYYYGMDV |
| | | SEQ ID NO: 1248 | SEQ ID NO: 1405 | SEQ ID NO: 1562 |
| iPS: 361499 | 17B11.002.002 | SYDIN | WMNPNSGNTGYAQKFQG | GGDYVWGSYRPYYYYYGMDV |
| | | SEQ ID NO: 1249 | SEQ ID NO: 1406 | SEQ ID NO: 1563 |
| iPS: 361503 | 17B11.002.003 | SYDIN | WMNPNSGGTGYAQKFQG | GGDYVWGSYRPYYYYYGMDV |
| | | SEQ ID NO: 1250 | SEQ ID NO: 1407 | SEQ ID NO: 1564 |
| iPS: 361507 | 17B11.002.004 | SYDIN | WMNPNSGGTGYAQKFQG | GGDYVWGSYRPYYYYYGMDV |
| | | SEQ ID NO: 1251 | SEQ ID NO: 1408 | SEQ ID NO: 1565 |
| iPS: 361514 | 17B11.002.005 | SYDIN | WMNPNSGGTGYAQKFQG | GGDYVWGSYRPYYYYYGMDV |
| | | SEQ ID NO: 1252 | SEQ ID NO: 1409 | SEQ ID NO: 1566 |
| iPS: 360582 | 17B11.002.006 | SYDIN | WMNPNSGNTGYAQKFQG | GGDYVWGSYRPYYYYYGMDV |
| | | SEQ ID NO: 1253 | SEQ ID NO: 1410 | SEQ ID NO: 1567 |
| iPS: 361518 | 17B11.002.007 | SYDIN | WMNPNSGGTGYAQKFQG | GGDYVFGSYRPYYYYYGMDV |
| | | SEQ ID NO: 1254 | SEQ ID NO: 1411 | SEQ ID NO: 1568 |
| iPS: 360570 | 17B11.002.008 | SYDIN | WMNPNSGGTGYAQKFQG | GGDYVFGSYRPYYYYYGMDV |
| | | SEQ ID NO: 1255 | SEQ ID NO: 1412 | SEQ ID NO: 1569 |
| iPS: 362051 | 5G12.005.001 | SYGIH | VIWYDASNKFHADAVKG | GKVAGMPEAFEI |
| | | SEQ ID NO: 1256 | SEQ ID NO: 1413 | SEQ ID NO: 1570 |

TABLE 14
Light Chain (LC) Amino Acid Sequences of Example Anti-GIPR Antibodies

| | | | SEQ |
|---|---|---|---|
| Identifier | Construct | LC | ID NO: |
| iPS:336175 | 2C2.005 | QSVLTQPPSASGTPGQRVTISCSGSSSNIGSNTVNWYQHLPGTAPKLLIYTNNQRPS | 315 |
| | | GVPDRFSGSKSGTSASLAISGLQSEDEADYFCATFDDSLNGPVFGGGTKLTVLGQP | |
| | | KAAPSVTLFPPSSEELQANKATLVCLISDFYPGAVTVAWKADSSPVKAGVETTTPS | |
| | | KQSNNKYAASSYLSLTPEQWKSHRSYSCQVTHEGSTVEKTVAPTECS | |
| iPS:335914 | 4B1 | DIQMTQSPSSLSASIGDRVTITCRASQDIRDYLGWYQQKPGKAPKRLIYGASSLQSG | 316 |
| | | VPSRFSGSGSGTEFTLTISSLQPEDFATYYCLQHNNYPFTFGPGTKVDIKRTVAAPS | |
| | | VFIFPPSDEQLKSGTASVVCLLNNFYPREAKVQWKVDNALQSGNSQESVTEQDSK | |
| | | DSTYSLSSTLTLSKADYEKHKVYACEVTHQGLSSPVTKSFNRGEC | |
| iPS:335938 | 6H1 | DIQMTQSPSSLSASIGDRVTITCRASQDIRDYLGWYQQKPGKAPKRLIYGASSLQSG | 317 |
| | | VPSRFSGSGSGTEFTLTISSLQPEDFATYYCLQHNNYPFTFGPGTKVDIKRTVAAPS | |
| | | VFIFPPSDEQLKSGTASVVCLLNNFYPREAKVQWKVDNALQSGNSQESVTEQDSK | |
| | | DSTYSLSSTLTLSKADYEKHKVYACEVTHQGLSSPVTKSFNRGEC | |
| iPS:335941 | 2F11 | DIQMTQSPSSLSASVGDRVTITCQASQDISNYLNWYQQKPGKAPKLLIYDASNLET | 318 |
| | | GVPSRFSGSGSGTDFSFTISSLQPEDIATYYCQQYDILLTFGGGTKVEIKRTVAAPSV | |
| | | FIFPPSDEQLKSGTASVVCLLNNFYPREAKVQWKVDNALQSGNSQESVTEQDSKD | |
| | | STYSLSSTLTLSKADYEKHKVYACEVTHQGLSSPVTKSFNRGEC | |
| iPS:335970 | 5C2 | DIVMTQSPDSLAVSLGERATINCKSSQSVLSSSNNKNYIAWYQQQPGHPPKLLIYW | 319 |
| | | ASTRESGVPDRFSGSGSGTDFTLTISSLQAEDVAVFYCQQYYSTPWTFGQGTKVEI | |
| | | KRTVAAPSVFIFPPSDEQLKSGTASVVCLLNNFYPREAKVQWKVDNALQSGNSQE | |
| | | SVTEQDSKDSTYSLSSTLTLSKADYEKHKVYACEVTHQGLSSPVTKSFNRGEC | |
| iPS:335978 | 13H12 | DIVMTQSPDSLAVSLGERATINCKSSQSVLSSSNNKNYIAWYQQKPGHPPKLLIYW | 320 |
| | | ASTRESGVPDRFSGSGSGTDFTLTISSLQAEDVAVFYCQQYYSTPWTFGQGTKVEI | |
| | | KRTVAAPSVFIFPPSDEQLKSGTASVVCLLNNFYPREAKVQWKVDNALQSGNSQE | |
| | | SVTEQDSKDSTYSLSSTLTLSKADYEKHKVYACEVTHQGLSSPVTKSFNRGEC | |
| iPS:335986 | 11C1 | DIVMTQSPDSLSVSLGERATINCKSSQSVLSSSNNKNYLAWYQQKPGQPPNLLIYW | 321 |
| | | TSTRDSGVPDRFSGSGSGTDFTLTINSLQAEDVAVYYCQQYYRTPWTFGQGTKVEI | |
| | | KRTVAAPSVFIFPPSDEQLKSGTASVVCLLNNFYPREAKVQWKVDNALQSGNSQE | |
| | | SVTEQDSKDSTYSLSSTLTLSKADYEKHKVYACEVTHQGLSSPVTKSFNRGEC | |
| iPS:335994 | 12H11 | DIVMTQSPDSLSVSLGERATINCKSSQSVLSSSNNKNYLAWYQQKPGQPPNLLIYW | 322 |
| | | TSTRDSGVPDRFSGSGSGTDFTLTINSLQAEDVAVYYCQQYYRTPWTFGQGTKVEI | |
| | | KRTVAAPSVFIFPPSDEQLKSGTASVVCLLNNFYPREAKVQWKVDNALQSGNSQE | |
| | | SVTEQDSKDSTYSLSSTLTLSKADYEKHKVYACEVTHQGLSSPVTKSFNRGEC | |
| iPS:336024 | 18E3 | EIVLTQSPGTLSLSPGERATLSCRASQSISYSYLAWYQQKPGQAPRLLIYGASSRAT | 323 |
| | | GIPDRFSGSGSGTDFTLTISRQEPDDFAVYYCQQYGSSPLTFGGGTKVEIKRTVAAP | |
| | | SVFIFPPSDEQLKSGTASVVCLLNNFYPREAKVQWKVDNALQSGNSQESVTEQDS | |
| | | KDSTYSLSSTLTLSKADYEKHKVYACEVTHQGLSSPVTKSFNRGEC | |
| iPS:336041 | 2G10_LC1 | EIVMTQSPATLSVSPGERATLSCRASQSVSSNLAWYQQKPGQAPRLLIYGAATRAT | 324 |
| | | GIPARVSGSGSGTEFTLTISSLQSEDFAVYYCQQYNNWPLTFGGGTKVEIKRTVAA | |
| | | PSVFIFPPSDEQLKSGTASVVCLLNNFYPREAKVQWKVDNALQSGNSQESVTEQDS | |
| | | KDSTYSLSSTLTLSKADYEKHKVYACEVTHQGLSSPVTKSFNRGEC | |
| iPS:336077 | 4H9.004 | DIQMTQSPSSLSASVGDRVTITCRASQGIRNELGWYQQKPGKAPKRLIYGASSLQS | 325 |
| | | GVPSRFSGSGSGTEFTLTISSLQPEDFVTYYCLQHNSYPFTFGPGTKVDVKRTVAAP | |
| | | SVFIFPPSDEQLKSGTASVVCLLNNFYPREAKVQWKVDNALQSGNSQESVTEQDS | |
| | | KDSTYSLSSTLTLSKADYEKHKVYACEVTHQGLSSPVTKSFNRGEC | |
| iPS:336088 | 6A5.004 | DIQMTQSPSSLSASVGDRVTITCQASQDITNYLNWYQQKPGKAPKLLIYDASNLEP | 326 |
| | | GVPSRFSGSGSGTDFTFTISSLQPEDIATYYCQQYDDLFTFGPGTKVDIKRTVAAPS | |
| | | VFIFPPSDEQLKSGTASVVCLLNNFYPREAKVQWKVDNALQSGNSQESVTEQDSK | |
| | | DSTYSLSSTLTLSKADYEKHKVYACEVTHQGLSSPVTKSFNRGEC | |
| iPS:336099 | 17H11.004 | DIQMTQSPSSVSASVGDRVTITCRASQGLIIWLAWYQQKPGKAPKLLIYAASSLQS | 327 |
| | | GVPSRFSGSGSGTDFTLTISSLQPEDFATYYCQQTNSFPPTFGQGTKVEIKRTVAAPS | |
| | | VFIFPPSDEQLKSGTASVVCLLNNFYPREAKVQWKVDNALQSGNSQESVTEQDSK | |
| | | DSTYSLSSTLTLSKADYEKHKVYACEVTHQGLSSPVTKSFNRGEC | |
| iPS:359621 | 17H11.004.001 | DIQMTQSPSSVSASVGDRVTITCRASQGLIIWLAWYQQKPGKAPKLLIYAASSLQS | 328 |
| | | GVPSRFSGSGSGTDFTLTISSLQPEDFATYYCQQTNSFPPTFGQGTKVEIKRTVAAPS | |
| | | VFIFPPSDEQLKSGTASVVCLLNNFYPREAKVQWKVDNALQSGNSQESVTEQDSK | |
| | | DSTYSLSSTLTLSKADYEKHKVYACEVTHQGLSSPVTKSFNRGEC | |
| iPS:359781 | 4H9.004.001 | DIQMTQSPSSLSASVGDRVTITCRASQGIRNELGWYQQKPGKAPKLLIYGASSLQS | 329 |
| | | GVPSRFSGSGSGTEFTLTISSLQPEDFVTYYCLQHNSYPFTFGQGTKVDVKRTVAAP | |
| | | SVFIFPPSDEQLKSGTASVVCLLNNFYPREAKVQWKVDNALQSGNSQESVTEQDS | |
| | | KDSTYSLSSTLTLSKADYEKHKVYACEVTHQGLSSPVTKSFNRGEC | |
| iPS:360929 | 4H9.004.002 | DIQMTQSPSSLSASVGDRVTITCRASQGIRNELGWYQQKPGKAPKLLIYGASSLQS | 330 |
| | | GVPSRFSGSGSGTEFTLTISSLQPEDFVTYYCLQHNSYPFTFGQGTKVDVKRTVAAP | |
| | | SVFIFPPSDEQLKSGTASVVCLLNNFYPREAKVQWKVDNALQSGNSQESVTEQDS | |
| | | KDSTYSLSSTLTLSKADYEKHKVYACEVTHQGLSSPVTKSFNRGEC | |
| iPS:360936 | 4H9.004.003 | DIQMTQSPSSLSASVGDRVTITCRASQGIRNELGWYQQKPGKAPKLLIYGASSLQS | 331 |
| | | GVPSRFSGSGSGTEFTLTISSLQPEDFVTYYCLQHNSYPFTFGQGTKVDVKRTVAAP | |
| | | SVFIFPPSDEQLKSGTASVVCLLNNFYPREAKVQWKVDNALQSGNSQESVTEQDS | |
| | | KDSTYSLSSTLTLSKADYEKHKVYACEVTHQGLSSPVTKSFNRGEC | |
| iPS:360943 | 4H9.004.004 | DIQMTQSPSSLSASVGDRVTITCRASQGIRNELGWYQQKPGKAPKLLIYGASSLQS | 332 |
| | | GVPSRFSGSGSGTEFTLTISSLQPEDFVTYYCLQHNSYPFTFGPGTKVDVKRTVAAP | |
| | | SVFIFPPSDEQLKSGTASVVCLLNNFYPREAKVQWKVDNALQSGNSQESVTEQDS | |
| | | KDSTYSLSSTLTLSKADYEKHKVYACEVTHQGLSSPVTKSFNRGEC | |
| iPS:360949 | 4H9.004.005 | DIQMTQSPSSLSASVGDRVTITCRASQGIRNELGWYQQKPGKAPKRLIYGASSLQS | 333 |
| | | GVPSRFSGSGSGTEFTLTISSLQPEDFVTYYCLQHNSYPFTFGQGTKVDVKRTVAAP | |
| | | SVFIFPPSDEQLKSGTASVVCLLNNFYPREAKVQWKVDNALQSGNSQESVTEQDS | |
| | | KDSTYSLSSTLTLSKADYEKHKVYACEVTHQGLSSPVTKSFNRGEC | |
| iPS:359761 | 4H9.004.006 | DIQMTQSPSSLSASVGDRVTITCRASQGIRNELGWYQQKPGKAPKLLIYGASSLQS | 334 |
| | | GVPSRFSGSGSGTEFTLTISSLQPEDFVTYYCLQHNSYPFTFGQGTKVDVKRTVAAP | |
| | | SVFIFPPSDEQLKSGTASVVCLLNNFYPREAKVQWKVDNALQSGNSQESVTEQDS | |
| | | KDSTYSLSSTLTLSKADYEKHKVYACEVTHQGLSSPVTKSFNRGEC | |
| iPS:360955 | 4B1.010 | DIQMTQSPSSLSASIGDRVTITCRASQDIRDYLGWYQQKPGKAPKLLIYGASSLQSG | 335 |
| | | VPSRFSGSGSGTEFTLTISSLQPEDFATYYCLQHNNYPFTFGQGTKVDIKRTVAAPS | |
| | | VFIFPPSDEQLKSGTASVVCLLNNFYPREAKVQWKVDNALQSGNSQESVTEQDSK | |
| | | DSTYSLSSTLTLSKADYEKHKVYACEVTHQGLSSPVTKSFNRGEC | |
| iPS:360962 | 4B1.011 | DIQMTQSPSSLSASIGDRVTITCRASQDIRDYLGWYQQKPGKAPKRLIYGASSLQSG | 336 |
| | | VPSRFSGSGSGTEFTLTISSLQPEDFATYYCLQHNNYPFTFGQGTKVDIKRTVAAPS | |
| | | VFIFPPSDEQLKSGTASVVCLLNNFYPREAKVQWKVDNALQSGNSQESVTEQDSK | |
| | | DSTYSLSSTLTLSKADYEKHKVYACEVTHQGLSSPVTKSFNRGEC | |
| iPS:360968 | 4B1.012 | DIQMTQSPSSLSASIGDRVTITCRASQDIRDYLGWYQQKPGKAPKLLIYGASSLQSG | 337 |
| | | VPSRFSGSGSGTEFTLTISSLQPEDFATYYCLQHNNYPFTFGPGTKVDIKRTVAAPS | |
| | | VFIFPPSDEQLKSGTASVVCLLNNFYPREAKVQWKVDNALQSGNSQESVTEQDSK | |
| | | DSTYSLSSTLTLSKADYEKHKVYACEVTHQGLSSPVTKSFNRGEC | |
| iPS:360974 | 4B1.013 | DIQMTQSPSSLSASIGDRVTITCRASQDIRDYLGWYQQKPGKAPKLLIYGASSLQSG | 338 |
| | | VPSRFSGSGSGTEFTLTISSLQPEDFATYYCLQHNNYPFTFGQGTKVDIKRTVAAPS | |
| | | VFIFPPSDEQLKSGTASVVCLLNNFYPREAKVQWKVDNALQSGNSQESVTEQDSK | |
| | | DSTYSLSSTLTLSKADYEKHKVYACEVTHQGLSSPVTKSFNRGEC | |
| iPS:360978 | 4B1.014 | DIQMTQSPSSLSASIGDRVTITCRASQDIRDYLGWYQQKPGKAPKLLIYGASSLQSG | 339 |
| | | VPSRFSGSGSGTEFTLTISSLQPEDFATYYCLQHNNYPFTFGQGTKVDIKRTVAAPS | |
| | | VFIFPPSDEQLKSGTASVVCLLNNFYPREAKVQWKVDNALQSGNSQESVTEQDSK | |
| | | DSTYSLSSTLTLSKADYEKHKVYACEVTHQGLSSPVTKSFNRGEC | |
| iPS:359785 | 4B1.015 | DIQMTQSPSSLSASIGDRVTITCRASQDIRDYLGWYQQKPGKAPKLLIYGASSLQSG | 340 |
| | | VPSRFSGSGSGTEFTLTISSLQPEDFATYYCLQHNNYPFTFGQGTKVDIKRTVAAPS | |
| | | VFIFPPSDEQLKSGTASVVCLLNNFYPREAKVQWKVDNALQSGNSQESVTEQDSK | |
| | | DSTYSLSSTLTLSKADYEKHKVYACEVTHQGLSSPVTKSFNRGEC | |
| iPS:360982 | 4B1.016 | DIQMTQSPSSLSASIGDRVTITCRASQDIRDYLGWYQQKPGKAPKLLIYGASSLQSG | 341 |
| | | VPSRFSGSGSGTEFTLTISSLQPEDFATYYCLQHNNYPFTFGQGTKVDIKRTVAAPS | |
| | | VFIFPPSDEQLKSGTASVVCLLNNFYPREAKVQWKVDNALQSGNSQESVTEQDSK | |
| | | DSTYSLSSTLTLSKADYEKHKVYACEVTHQGLSSPVTKSFNRGEC | |
| iPS:335922 | 18F2 | DIQMTQSPSSLSASIGDRVTITCRASQDLRNYLGWYHQKPGKAPKRLIYGASSLQS | 342 |
| | | GVPSRFSGSGSGTEFTLTISSLQPEDFATYYCLQHNNYPFTFGPGTKVDIKRTVAAP | |
| | | SVFIFPPSDEQLKSGTASVVCLLNNFYPREAKVQWKVDNALQSGNSQESVTEQDS | |
| | | KDSTYSLSSTLTLSKADYEKHKVYACEVTHQGLSSPVTKSFNRGEC | |
| iPS:360986 | 18F2.002 | DIQMTQSPSSLSASIGDRVTITCRASQDLRNYLGWYQQKPGKAPKLLIYGASSLQS | 343 |
| | | GVPSRFSGSGSGTEFTLTISSLQPEDFATYYCLQHNNYPFTFGPGTKVDIKRTVAAP | |
| | | SVFIFPPSDEQLKSGTASVVCLLNNFYPREAKVQWKVDNALQSGNSQESVTEQDS | |
| | | KDSTYSLSSTLTLSKADYEKHKVYACEVTHQGLSSPVTKSFNRGEC | |
| iPS:360995 | 18F2.003 | DIQMTQSPSSLSASIGDRVTITCRASQDLRNYLGWYQQKPGKAPKLLIYGASSLQS | 344 |
| | | GVPSRFSGSGSGTEFTLTISSLQPEDFATYYCLQHNNYPFTFGPGTKVDIKRTVAAP | |
| | | SVFIFPPSDEQLKSGTASVVCLLNNFYPREAKVQWKVDNALQSGNSQESVTEQDS | |
| | | KDSTYSLSSTLTLSKADYEKHKVYACEVTHQGLSSPVTKSFNRGEC | |
| iPS:360999 | 18F2.004 | DIQMTQSPSSLSASIGDRVTITCRASQDLRNYLGWYHQKPGKAPKLLIYGASSLQS | 345 |
| | | GVPSRFSGSGSGTEFTLTISSLQPEDFATYYCLQHNNYPFTFGPGTKVDIKRTVAAP | |
| | | SVFIFPPSDEQLKSGTASVVCLLNNFYPREAKVQWKVDNALQSGNSQESVTEQDS | |
| | | KDSTYSLSSTLTLSKADYEKHKVYACEVTHQGLSSPVTKSFNRGEC | |
| iPS:361005 | 18F2.005 | DIQMTQSPSSLSASIGDRVTITCRASQDLRNYLGWYQQKPGKAPKRLIYGASSLQS | 346 |
| | | GVPSRFSGSGSGTEFTLTISSLQPEDFATYYCLQHNNYPFTFGPGTKVDIKRTVAAP | |
| | | SVFIFPPSDEQLKSGTASVVCLLNNFYPREAKVQWKVDNALQSGNSQESVTEQDS | |
| | | KDSTYSLSSTLTLSKADYEKHKVYACEVTHQGLSSPVTKSFNRGEC | |
| iPS:361009 | 18F2.006 | DIQMTQSPSSLSASIGDRVTITCRASQDLRNYLGWYQQKPGKAPKRLIYGASSLQS | 347 |
| | | GVPSRFSGSGSGTEFTLTISSLQPEDFATYYCLQHNNYPFTFGPGTKVDIKRTVAAP | |
| | | SVFIFPPSDEQLKSGTASVVCLLNNFYPREAKVQWKVDNALQSGNSQESVTEQDS | |
| | | KDSTYSLSSTLTLSKADYEKHKVYACEVTHQGLSSPVTKSFNRGEC | |
| iPS:361013 | 18F2.007 | DIQMTQSPSSLSASIGDRVTITCRASQDLRNYLGWYHQKPGKAPKLLIYGASSLQS | 348 |
| | | GVPSRFSGSGSGTEFTLTISSLQPEDFATYYCLQHNNYPFTFGPGTKVDIKRTVAAP | |
| | | SVFIFPPSDEQLKSGTASVVCLLNNFYPREAKVQWKVDNALQSGNSQESVTEQDS | |
| | | KDSTYSLSSTLTLSKADYEKHKVYACEVTHQGLSSPVTKSFNRGEC | |
| iPS:361017 | 18F2.008 | DIQMTQSPSSLSASIGDRVTITCRASQDLRNYLGWYHQKPGKAPKRLIYGASSLQS | 349 |
| | | GVPSRFSGSGSGTEFTLTISSLQPEDFATYYCLQHNNYPFTFGPGTKVDIKRTVAAP | |
| | | SVFIFPPSDEQLKSGTASVVCLLNNFYPREAKVQWKVDNALQSGNSQESVTEQDS | |
| | | KDSTYSLSSTLTLSKADYEKHKVYACEVTHQGLSSPVTKSFNRGEC | |
| iPS:361021 | 18F2.009 | DIQMTQSPSSLSASIGDRVTITCRASQDLRNYLGWYQQKPGKAPKLLIYGASSLQS | 350 |
| | | GVPSRFSGSGSGTEFTLTISSLQPEDFATYYCLQHNNYPFTFGPGTKVDIKRTVAAP | |
| | | SVFIFPPSDEQLKSGTASVVCLLNNFYPREAKVQWKVDNALQSGNSQESVTEQDS | |
| | | KDSTYSLSSTLTLSKADYEKHKVYACEVTHQGLSSPVTKSFNRGEC | |
| iPS:361028 | 18F2.010 | DIQMTQSPSSLSASIGDRVTITCRASQDLRNYLGWYQQKPGKAPKLLIYGASSLQS | 351 |
| | | GVPSRFSGSGSGTEFTLTISSLQPEDFATYYCLQHNNYPFTFGPGTKVDIKRTVAAP | |
| | | SVFIFPPSDEQLKSGTASVVCLLNNFYPREAKVQWKVDNALQSGNSQESVTEQDS | |
| | | KDSTYSLSSTLTLSKADYEKHKVYACEVTHQGLSSPVTKSFNRGEC | |
| iPS:360535 | 18F2.011 | DIQMTQSPSSLSASIGDRVTITCRASQDLRNYLGWYQQKPGKAPKLLIYGASSLQS | 352 |
| | | GVPSRFSGSGSGTEFTLTISSLQPEDFATYYCLQHNNYPFTFGQGTKVDIKRTVAAP | |
| | | SVFIFPPSDEQLKSGTASVVCLLNNFYPREAKVQWKVDNALQSGNSQESVTEQDS | |
| | | KDSTYSLSSTLTLSKADYEKHKVYACEVTHQGLSSPVTKSFNRGEC | |
| iPS:361035 | 18F2.012 | DIQMTQSPSSLSASIGDRVTITCRASQDLRNYLGWYQQKPGKAPKLLIYGASSLQS | 353 |
| | | GVPSRFSGSGSGTEFTLTISSLQPEDFATYYCLQHNNYPFTFGPGTKVDIKRTVAAP | |
| | | SVFIFPPSDEQLKSGTASVVCLLNNFYPREAKVQWKVDNALQSGNSQESVTEQDS | |
| | | KDSTYSLSSTLTLSKADYEKHKVYACEVTHQGLSSPVTKSFNRGEC | |
| iPS:359940 | 2F11.002 | DIQMTQSPSSLSASVGDRVTITCQASQDISNYLNWYQQKPGKAPKLLIYDASNLET | 354 |
| | | GVPSRFSGSGSGTDFSLTISSLQPEDFATYYCQQYDILLTFGGGTKVEIKRTVAAPS | |
| | | VFIFPPSDEQLKSGTASVVCLLNNFYPREAKVQWKVDNALQSGNSQESVTEQDSK | |
| | | DSTYSLSSTLTLSKADYEKHKVYACEVTHQGLSSPVTKSFNRGEC | |
| iPS:361039 | 2F11.003 | DIQMTQSPSSLSASVGDRVTITCQASQDISNYLNWYQQKPGKAPKLLIYDASNLET | 355 |
| | | GVPSRFSGSGSGTDFSLTISSLQPEDFATYYCQQYDILLTFGGGTKVEIKRTVAAPS | |
| | | VFIFPPSDEQLKSGTASVVCLLNNFYPREAKVQWKVDNALQSGNSQESVTEQDSK | |
| | | DSTYSLSSTLTLSKADYEKHKVYACEVTHQGLSSPVTKSFNRGEC | |
| iPS:361043 | 2F11.004 | DIQMTQSPSSLSASVGDRVTITCQASQDISNYLNWYQQKPGKAPKLLIYDASNLET | 356 |
| | | GVPSRFSGSGSGTDFSLTISSLQPEDIATYYCQQYDILLTFGGGTKVEIKRTVAAPSV | |
| | | FIFPPSDEQLKSGTASVVCLLNNFYPREAKVQWKVDNALQSGNSQESVTEQDSKD | |
| | | STYSLSSTLTLSKADYEKHKVYACEVTHQGLSSPVTKSFNRGEC | |
| iPS:361049 | 2F11.005 | DIQMTQSPSSLSASVGDRVTITCQASQDISNYLNWYQQKPGKAPKLLIYDASNLET | 357 |
| | | GVPSRFSGSGSGTDFSFTISSLQPEDFATYYCQQYDILLTFGGGTKVEIKRTVAAPSV | |
| | | FIFPPSDEQLKSGTASVVCLLNNFYPREAKVQWKVDNALQSGNSQESVTEQDSKD | |
| | | STYSLSSTLTLSKADYEKHKVYACEVTHQGLSSPVTKSFNRGEC | |
| iPS:361055 | 2F11.006 | DIQMTQSPSSLSASVGDRVTITCQASQDISNYLNWYQQKPGKAPKLLIYDASNLET | 358 |
| | | GVPSRFSGSGSGTDFSLTISSLQPEDIATYYCQQYDILLTFGGGTKVEIKRTVAAPSV | |
| | | FIFPPSDEQLKSGTASVVCLLNNFYPREAKVQWKVDNALQSGNSQESVTEQDSKD | |
| | | STYSLSSTLTLSKADYEKHKVYACEVTHQGLSSPVTKSFNRGEC | |
| iPS:361059 | 2F11.007 | DIQMTQSPSSLSASVGDRVTITCQASQDISNYLNWYQQKPGKAPKLLIYDASNLET | 359 |
| | | GVPSRFSGSGSGTDFSFTISSLQPEDFATYYCQQYDILLTFGGGTKVEIKRTVAAPSV | |
| | | FIFPPSDEQLKSGTASVVCLLNNFYPREAKVQWKVDNALQSGNSQESVTEQDSKD | |
| | | STYSLSSTLTLSKADYEKHKVYACEVTHQGLSSPVTKSFNRGEC | |
| iPS:361063 | 2F11.008 | DIQMTQSPSSLSASVGDRVTITCQASQDISNYLNWYQQKPGKAPKLLIYDASNLET | 360 |
| | | GVPSRFSGSGSGTDFSFTISSLQPEDIATYYCQQYDILLTFGGGTKVEIKRTVAAPSV | |
| | | FIFPPSDEQLKSGTASVVCLLNNFYPREAKVQWKVDNALQSGNSQESVTEQDSKD | |
| | | STYSLSSTLTLSKADYEKHKVYACEVTHQGLSSPVTKSFNRGEC | |
| iPS:359949 | 2F11.009 | DIQMTQSPSSLSASVGDRVTITCQASQDISNYLNWYQQKPGKAPKLLIYDASNLET | 361 |
| | | GVPSRFSGSGSGTDFSLTISSLQPEDFATYYCQQYDILLTFGGGTKVEIKRTVAAPS | |
| | | VFIFPPSDEQLKSGTASVVCLLNNFYPREAKVQWKVDNALQSGNSQESVTEQDSK | |
| | | DSTYSLSSTLTLSKADYEKHKVYACEVTHQGLSSPVTKSFNRGEC | |
| iPS:359956 | 2F11.010 | DIQMTQSPSSLSASVGDRVTITCQASQDISNYLNWYQQKPGKAPKLLIYDASNLET | 362 |
| | | GVPSRFSGSGSGTDFSLTISSLQPEDFATYYCQQYDILLTFGGGTKVEIKRTVAAPS | |
| | | VFIFPPSDEQLKSGTASVVCLLNNFYPREAKVQWKVDNALQSGNSQESVTEQDSK | |
| | | DSTYSLSSTLTLSKADYEKHKVYACEVTHQGLSSPVTKSFNRGEC | |
| iPS:359865 | 6H1.002 | DIQMTQSPSSLSASIGDRVTITCRASQDIRDYLGWYQQKPGKAPKRLIYGASSLQSG | 363 |
| | | VPSRFSGSGSGTEFTLTISSLQPEDFATYYCLQHNNYPFTFGPGTKVDIKRTVAAPS | |
| | | VFIFPPSDEQLKSGTASVVCLLNNFYPREAKVQWKVDNALQSGNSQESVTEQDSK | |
| | | DSTYSLSSTLTLSKADYEKHKVYACEVTHQGLSSPVTKSFNRGEC | |
| iPS:359869 | 6H1.003 | DIQMTQSPSSLSASIGDRVTITCRASQDIRDYLGWYQQKPGKAPKRLIYGASSLQSG | 364 |
| | | VPSRFSGSGSGTEFTLTISSLQPEDFATYYCLQHNNYPFTFGPGTKVDIKRTVAAPS | |
| | | VFIFPPSDEQLKSGTASVVCLLNNFYPREAKVQWKVDNALQSGNSQESVTEQDSK | |
| | | DSTYSLSSTLTLSKADYEKHKVYACEVTHQGLSSPVTKSFNRGEC | |
| iPS:359873 | 6H1.004 | DIQMTQSPSSLSASIGDRVTITCRASQDIRDYLGWYQQKPGKAPKLLIYGASSLQSG | 365 |
| | | VPSRFSGSGSGTEFTLTISSLQPEDFATYYCLQHNNYPFTFGQGTKVDIKRTVAAPS | |
| | | VFIFPPSDEQLKSGTASVVCLLNNFYPREAKVQWKVDNALQSGNSQESVTEQDSK | |
| | | DSTYSLSSTLTLSKADYEKHKVYACEVTHQGLSSPVTKSFNRGEC | |
| iPS:359877 | 6H1.005 | DIQMTQSPSSLSASIGDRVTITCRASQDIRDYLGWYQQKPGKAPKLLIYGASSLQSG | 366 |
| | | VPSRFSGSGSGTEFTLTISSLQPEDFATYYCLQHNNYPFTFGQGTKVDIKRTVAAPS | |
| | | VFIFPPSDEQLKSGTASVVCLLNNFYPREAKVQWKVDNALQSGNSQESVTEQDSK | |
| | | DSTYSLSSTLTLSKADYEKHKVYACEVTHQGLSSPVTKSFNRGEC | |
| iPS:361067 | 6H1.006 | DIQMTQSPSSLSASIGDRVTITCRASQDIRDYLGWYQQKPGKAPKLLIYGASSLQSG | 367 |
| | | VPSRFSGSGSGTEFTLTISSLQPEDFATYYCLQHNNYPFTFGPGTKVDIKRTVAAPS | |
| | | VFIFPPSDEQLKSGTASVVCLLNNFYPREAKVQWKVDNALQSGNSQESVTEQDSK | |
| | | DSTYSLSSTLTLSKADYEKHKVYACEVTHQGLSSPVTKSFNRGEC | |
| iPS:361071 | 6H1.007 | DIQMTQSPSSLSASIGDRVTITCRASQDIRDYLGWYQQKPGKAPKLLIYGASSLQSG | 368 |
| | | VPSRFSGSGSGTEFTLTISSLQPEDFATYYCLQHNNYPFTFGPGTKVDIKRTVAAPS | |
| | | VFIFPPSDEQLKSGTASVVCLLNNFYPREAKVQWKVDNALQSGNSQESVTEQDSK | |
| | | DSTYSLSSTLTLSKADYEKHKVYACEVTHQGLSSPVTKSFNRGEC | |
| iPS:361075 | 6H1.008 | DIQMTQSPSSLSASIGDRVTITCRASQDIRDYLGWYQQKPGKAPKLLIYGASSLQSG | 369 |
| | | VPSRFSGSGSGTEFTLTISSLQPEDFATYYCLQHNNYPFTFGPGTKVDIKRTVAAPS | |
| | | VFIFPPSDEQLKSGTASVVCLLNNFYPREAKVQWKVDNALQSGNSQESVTEQDSK | |
| | | DSTYSLSSTLTLSKADYEKHKVYACEVTHQGLSSPVTKSFNRGEC | |
| iPS:361079 | 6A5.004.001 | DIQMTQSPSSLSASVGDRVTITCQASQDITNYLNWYQQKPGKAPKLLIYDASNLEP | 370 |
| | | GVPSRFSGSGSGTDFTLTISSLQPEDFATYYCQQYDDLFTFGPGTKVDIKRTVAAPS | |
| | | VFIFPPSDEQLKSGTASVVCLLNNFYPREAKVQWKVDNALQSGNSQESVTEQDSK | |
| | | DSTYSLSSTLTLSKADYEKHKVYACEVTHQGLSSPVTKSFNRGEC | |
| iPS:361085 | 6A5.004.002 | DIQMTQSPSSLSASVGDRVTITCQASQDITNYLNWYQQKPGKAPKLLIYDASNLEP | 371 |
| | | GVPSRFSGSGSGTDFTLTISSLQPEDIATYYCQQYDDLFTFGPGTKVDIKRTVAAPS | |
| | | VFIFPPSDEQLKSGTASVVCLLNNFYPREAKVQWKVDNALQSGNSQESVTEQDSK | |
| | | DSTYSLSSTLTLSKADYEKHKVYACEVTHQGLSSPVTKSFNRGEC | |
| iPS:361091 | 6A5.004.003 | DIQMTQSPSSLSASVGDRVTITCQASQDITNYLNWYQQKPGKAPKLLIYDASNLEP | 372 |
| | | GVPSRFSGSGSGTDFTLTISSLQPEDFATYYCQQYDDLFTFGPGTKVDIKRTVAAPS | |
| | | VFIFPPSDEQLKSGTASVVCLLNNFYPREAKVQWKVDNALQSGNSQESVTEQDSK | |
| | | DSTYSLSSTLTLSKADYEKHKVYACEVTHQGLSSPVTKSFNRGEC | |
| iPS:361095 | 6A5.004.004 | DIQMTQSPSSLSASVGDRVTITCQASQDITNYLNWYQQKPGKAPKLLIYDASNLEP | 373 |
| | | GVPSRFSGSGSGTDFTFTISSLQPEDFATYYCQQYDDLFTFGPGTKVDIKRTVAAPS | |
| | | VFIFPPSDEQLKSGTASVVCLLNNFYPREAKVQWKVDNALQSGNSQESVTEQDSK | |
| | | DSTYSLSSTLTLSKADYEKHKVYACEVTHQGLSSPVTKSFNRGEC | |
| iPS:361101 | 6A5.004.005 | DIQMTQSPSSLSASVGDRVTITCQASQDITNYLNWYQQKPGKAPKLLIYDASNLEP | 374 |
| | | GVPSRFSGSGSGTDFTLTISSLQPEDIATYYCQQYDDLFTFGPGTKVDIKRTVAAPS | |
| | | VFIFPPSDEQLKSGTASVVCLLNNFYPREAKVQWKVDNALQSGNSQESVTEQDSK | |
| | | DSTYSLSSTLTLSKADYEKHKVYACEVTHQGLSSPVTKSFNRGEC | |
| iPS:361105 | 6A5.004.006 | DIQMTQSPSSLSASVGDRVTITCQASQDITNYLNWYQQKPGKAPKLLIYDASNLEP | 375 |
| | | GVPSRFSGSGSGTDFTFTISSLQPEDFATYYCQQYDDLFTFGPGTKVDIKRTVAAPS | |
| | | VFIFPPSDEQLKSGTASVVCLLNNFYPREAKVQWKVDNALQSGNSQESVTEQDSK | |
| | | DSTYSLSSTLTLSKADYEKHKVYACEVTHQGLSSPVTKSFNRGEC | |
| iPS:361109 | 6A5.004.007 | DIQMTQSPSSLSASVGDRVTITCQASQDITNYLNWYQQKPGKAPKLLIYDASNLEP | 376 |
| | | GVPSRFSGSGSGTDFTFTISSLQPEDIATYYCQQYDDLFTFGPGTKVDIKRTVAAPS | |
| | | VFIFPPSDEQLKSGTASVVCLLNNFYPREAKVQWKVDNALQSGNSQESVTEQDSK | |
| | | DSTYSLSSTLTLSKADYEKHKVYACEVTHQGLSSPVTKSFNRGEC | |
| iPS:361113 | 6A5.004.008 | DIQMTQSPSSLSASVGDRVTITCQASQDITNYLNWYQQKPGKAPKLLIYDASNLEP | 377 |
| | | GVPSRFSGSGSGTDFTLTISSLQPEDFATYYCQQYDDLFTFGPGTKVDIKRTVAAPS | |
| | | VFIFPPSDEQLKSGTASVVCLLNNFYPREAKVQWKVDNALQSGNSQESVTEQDSK | |
| | | DSTYSLSSTLTLSKADYEKHKVYACEVTHQGLSSPVTKSFNRGEC | |
| iPS:361120 | 6A5.004.009 | DIQMTQSPSSLSASVGDRVTITCQASQDITNYLNWYQQKPGKAPKLLIYDASNLEP | 378 |
| | | GVPSRFSGSGSGTDFTLTISSLQPEDFATYYCQQYDDLFTFGPGTKVDIKRTVAAPS | |
| | | VFIFPPSDEQLKSGTASVVCLLNNFYPREAKVQWKVDNALQSGNSQESVTEQDSK | |
| | | DSTYSLSSTLTLSKADYEKHKVYACEVTHQGLSSPVTKSFNRGEC | |
| iPS:359896 | 6A5.004.010 | DIQMTQSPSSLSASVGDRVTITCQASQDITNYLNWYQQKPGKAPKLLIYDASNLEP | 379 |
| | | GVPSRFSGSGSGTDFTLTISSLQPEDFATYYCQQYDDLFTFGQGTKVDIKRTVAAPS | |
| | | VFIFPPSDEQLKSGTASVVCLLNNFYPREAKVQWKVDNALQSGNSQESVTEQDSK | |
| | | DSTYSLSSTLTLSKADYEKHKVYACEVTHQGLSSPVTKSFNRGEC | |
| iPS:359890 | 6A5.004.011 | DIQMTQSPSSLSASVGDRVTITCQASQDITNYLNWYQQKPGKAPKLLIYDASNLEP | 380 |
| | | GVPSRFSGSGSGTDFTLTISSLQPEDFATYYCQQYDDLFTFGQGTKVDIKRTVAAPS | |
| | | VFIFPPSDEQLKSGTASVVCLLNNFYPREAKVQWKVDNALQSGNSQESVTEQDSK | |
| | | DSTYSLSSTLTLSKADYEKHKVYACEVTHQGLSSPVTKSFNRGEC | |
| iPS:359567 | 2A11.002 | EIVLTQSPGTLSLSPGERATLSCRASQIFTSTYLAWYQQKPGQAPRLLIYGASSRAT | 381 |
| | | GIPDRFSGSGSGTDFTLTISRLEPEDFAVYYCQQYGSSPRFGQGTRLEIKRTVAAPSV | |
| | | FIFPPSDEQLKSGTASVVCLLNNFYPREAKVQWKVDNALQSGNSQESVTEQDSKD | |
| | | STYSLSSTLTLSKADYEKHKVYACEVTHQGLSSPVTKSFNRGEC | |
| iPS:335965 | 2A11.003 | EIVLTQSPGTLSLSPGERATLSCRASQIFTSTYLAWYQQKPGQAPRLLIYGASSRAT | 382 |
| | | GIPDRFSGSGSGTDFTLTISRLEPEDFAVYYCQQYGSSPRFGQGTRLEIKRTVAAPSV | |
| | | FIFPPSDEQLKSGTASVVCLLNNFYPREAKVQWKVDNALQSGNSQESVTEQDSKD | |
| | | STYSLSSTLTLSKADYEKHKVYACEVTHQGLSSPVTKSFNRGEC | |
| iPS:361158 | 2A11.004 | EIVLTQSPGTLSLSPGERATLSCRASQIFTSTYLAWYQQKPGQAPRLLIYGASSRAT | 383 |
| | | GIPDRFSGSGSGTDFTLTISRLEPEDFAVYYCQQYGSSPRFGQGTRLEIKRTVAAPSV | |
| | | FIFPPSDEQLKSGTASVVCLLNNFYPREAKVQWKVDNALQSGNSQESVTEQDSKD | |
| | | STYSLSSTLTLSKADYEKHKVYACEVTHQGLSSPVTKSFNRGEC | |
| iPS:361165 | 2A11.005 | EIVLTQSPGTLSLSPGERATLSCRASQIFTSTYLAWYQQKPGQAPRLLIYGASSRAT | 384 |
| | | GIPDRFSGSGSGTDFTLTISRLEPEDFAVYYCQQYGSSPRFGQGTRLEIKRTVAAPSV | |
| | | FIFPPSDEQLKSGTASVVCLLNNFYPREAKVQWKVDNALQSGNSQESVTEQDSKD | |
| | | STYSLSSTLTLSKADYEKHKVYACEVTHQGLSSPVTKSFNRGEC | |
| iPS:361172 | 2G10_LC1.003 | EIVMTQSPATLSVSPGERATLSCRASQSVSSNLAWYQQKPGQAPRLLIYGAATRAT | 385 |
| | | GIPARFSGSGSGTEFTLTISSLQSEDFAVYYCQQYNNWPLTFGGGTKVEIKRTVAAP | |
| | | SVFIFPPSDEQLKSGTASVVCLLNNFYPREAKVQWKVDNALQSGNSQESVTEQDS | |
| | | KDSTYSLSSTLTLSKADYEKHKVYACEVTHQGLSSPVTKSFNRGEC | |
| iPS:361178 | 2G10_LC1.004 | EIVMTQSPATLSVSPGERATLSCRASQSVSSNLAWYQQKPGQAPRLLIYGAATRAT | 386 |
| | | GIPARFSGSGSGTEFTLTISSLQSEDFAVYYCQQYNNWPLTFGGGTKVEIKRTVAAP | |
| | | SVFIFPPSDEQLKSGTASVVCLLNNFYPREAKVQWKVDNALQSGNSQESVTEQDS | |
| | | KDSTYSLSSTLTLSKADYEKHKVYACEVTHQGLSSPVTKSFNRGEC | |
| iPS:361185 | 2G10_LC1.005 | EIVMTQSPATLSVSPGERATLSCRASQSVSSNLAWYQQKPGQAPRLLIYGAATRAT | 387 |
| | | GIPARFSGSGSGTEFTLTISSLQSEDFAVYYCQQYNNWPLTFGGGTKVEIKRTVAAP | |
| | | SVFIFPPSDEQLKSGTASVVCLLNNFYPREAKVQWKVDNALQSGNSQESVTEQDS | |
| | | KDSTYSLSSTLTLSKADYEKHKVYACEVTHQGLSSPVTKSFNRGEC | |
| iPS:361192 | 2G10_LC1.006 | EIVMTQSPATLSVSPGERATLSCRASQSVSSNLAWYQQKPGQAPRLLIYGAATRAT | 388 |
| | | GIPARVSGSGSGTEFTLTISSLQSEDFAVYYCQQYNNWPLTFGGGTKVEIKRTVAA | |
| | | PSVFIFPPSDEQLKSGTASVVCLLNNFYPREAKVQWKVDNALQSGNSQESVTEQDS | |
| | | KDSTYSLSSTLTLSKADYEKHKVYACEVTHQGLSSPVTKSFNRGEC | |
| iPS:359609 | 2G10_LC1.007 | EIVMTQSPATLSVSPGERATLSCRASQSVSSNLAWYQQKPGQAPRLLIYGAATRAT | 389 |
| | | GIPARFSGSGSGTEFTLTISSLEPEDFAVYYCQQYNNFPLTFGGGTKVEIKRTVAAPS | |
| | | VFIFPPSDEQLKSGTASVVCLLNNFYPREAKVQWKVDNALQSGNSQESVTEQDSK | |
| | | DSTYSLSSTLTLSKADYEKHKVYACEVTHQGLSSPVTKSFNRGEC | |
| iPS:359615 | 2G10_LC1.008 | EIVMTQSPATLSVSPGERATLSCRASQSVSSNLAWYQQKPGQAPRLLIYGAATRAT | 390 |
| | | GIPARFSGSGSGTEFTLTISSLEPEDFAVYYCQQYNNYPLTFGGGTKVEIKRTVAAP | |
| | | SVFIFPPSDEQLKSGTASVVCLLNNFYPREAKVQWKVDNALQSGNSQESVTEQDS | |
| | | KDSTYSLSSTLTLSKADYEKHKVYACEVTHQGLSSPVTKSFNRGEC | |
| iPS:361196 | 2G10_LC1.009 | EIVMTQSPATLSVSPGERATLSCRASQSVSSNLAWYQQKPGQAPRLLIYGAATRAT | 391 |
| | | GIPARFSGSGSGTEFTLTISSLEPEDFAVYYCQQYNNWPLTFGGGTKVEIKRTVAAP | |
| | | SVFIFPPSDEQLKSGTASVVCLLNNFYPREAKVQWKVDNALQSGNSQESVTEQDS | |
| | | KDSTYSLSSTLTLSKADYEKHKVYACEVTHQGLSSPVTKSFNRGEC | |
| iPS:361202 | 2G10_LC1.010 | EIVMTQSPATLSVSPGERATLSCRASQSVSSNLAWYQQKPGQAPRLLIYGAATRAT | 392 |
| | | GIPARFSGSGSGTEFTLTISSLEPEDFAVYYCQQYNNWPLTFGGGTKVEIKRTVAAP | |
| | | SVFIFPPSDEQLKSGTASVVCLLNNFYPREAKVQWKVDNALQSGNSQESVTEQDS | |
| | | KDSTYSLSSTLTLSKADYEKHKVYACEVTHQGLSSPVTKSFNRGEC | |
| iPS:359644 | 18E3.002 | EIVLTQSPGTLSLSPGERATLSCRASQSISYSYLAWYQQKPGQAPRLLIYGASSRAT | 393 |
| | | GIPDRFSGSGSGTDFTLTISRLEPDDFAVYYCQQYGSSPLTFGGGTKVEIKRTVAAP | |
| | | SVFIFPPSDEQLKSGTASVVCLLNNFYPREAKVQWKVDNALQSGNSQESVTEQDS | |
| | | KDSTYSLSSTLTLSKADYEKHKVYACEVTHQGLSSPVTKSFNRGEC | |
| iPS:361206 | 18E3.003 | EIVLTQSPGTLSLSPGERATLSCRASQSISYSYLAWYQQKPGQAPRLLIYGASSRAT | 394 |
| | | GIPDRFSGSGSGTDFTLTISRQEPDDFAVYYCQQYGSSPLTFGGGTKVEIKRTVAAP | |
| | | SVFIFPPSDEQLKSGTASVVCLLNNFYPREAKVQWKVDNALQSGNSQESVTEQDS | |
| | | KDSTYSLSSTLTLSKADYEKHKVYACEVTHQGLSSPVTKSFNRGEC | |
| iPS:359628 | 18E3.004 | EIVLTQSPGTLSLSPGERATLSCRASQSISYSYLAWYQQKPGQAPRLLIYGASSRAT | 395 |
| | | GIPDRFSGSGSGTDFTLTISRLEPDDFAVYYCQQYGSSPLTFGGGTKVEIKRTVAAP | |
| | | SVFIFPPSDEQLKSGTASVVCLLNNFYPREAKVQWKVDNALQSGNSQESVTEQDS | |
| | | KDSTYSLSSTLTLSKADYEKHKVYACEVTHQGLSSPVTKSFNRGEC | |
| iPS:359637 | 18E3.005 | EIVLTQSPGTLSLSPGERATLSCRASQSISYSYLAWYQQKPGQAPRLLIYGASSRAT | 396 |
| | | GIPDRFSGSGSGTDFTLTISRLEPDDFAVYYCQQYGSSPLTFGGGTKVEIKRTVAAP | |
| | | SVFIFPPSDEQLKSGTASVVCLLNNFYPREAKVQWKVDNALQSGNSQESVTEQDS | |
| | | KDSTYSLSSTLTLSKADYEKHKVYACEVTHQGLSSPVTKSFNRGEC | |
| iPS:361210 | 18E3.006 | EIVLTQSPGTLSLSPGERATLSCRASQSISYSYLAWYQQKPGQAPRLLIYGASSRAT | 397 |
| | | GIPDRFSGSGSGTDFTLTISRLEPDDFAVYYCQQYGSSPLTFGGGTKVEIKRTVAAP | |
| | | SVFIFPPSDEQLKSGTASVVCLLNNFYPREAKVQWKVDNALQSGNSQESVTEQDS | |
| | | KDSTYSLSSTLTLSKADYEKHKVYACEVTHQGLSSPVTKSFNRGEC | |
| iPS:361214 | 18E3.007 | EIVLTQSPGTLSLSPGERATLSCRASQSISYSYLAWYQQKPGQAPRLLIYGASSRAT | 398 |
| | | GIPDRFSGSGSGTDFTLTISRQEPDDFAVYYCQQYGSSPLTFGGGTKVEIKRTVAAP | |
| | | SVFIFPPSDEQLKSGTASVVCLLNNFYPREAKVQWKVDNALQSGNSQESVTEQDS | |
| | | KDSTYSLSSTLTLSKADYEKHKVYACEVTHQGLSSPVTKSFNRGEC | |
| iPS:361218 | 18E3.008 | EIVLTQSPGTLSLSPGERATLSCRASQSISYSYLAWYQQKPGQAPRLLIYGASSRAT | 399 |
| | | GIPDRFSGSGSGTDFTLTISRQEPDDFAVYYCQQYGSSPLTFGGGTKVEIKRTVAAP | |
| | | SVFIFPPSDEQLKSGTASVVCLLNNFYPREAKVQWKVDNALQSGNSQESVTEQDS | |
| | | KDSTYSLSSTLTLSKADYEKHKVYACEVTHQGLSSPVTKSFNRGEC | |
| iPS:361222 | 5C2.006 | DIVMTQSPDSLAVSLGERATINCKSSQSVLSSSNNKNYIAWYQQQPGHPPKLLIYW | 400 |
| | | ASTRESGVPDRFSGSGSGTDFTLTISSLQAEDVAVFYCQQYYSTPWTFGQGTKVEI | |
| | | KRTVAAPSVFIFPPSDEQLKSGTASVVCLLNNFYPREAKVQWKVDNALQSGNSQE | |
| | | SVTEQDSKDSTYSLSSTLTLSKADYEKHKVYACEVTHQGLSSPVTKSFNRGEC | |
| iPS:361229 | 5C2.007 | DIVMTQSPDSLAVSLGERATINCKSSQSVLSSSNNKNYIAWYQQQPGHPPKLLIYW | 401 |
| | | ASTRESGVPDRFSGSGSGTDFTLTISSLQAEDVAVFYCQQYYSTPWTFGQGTKVEI | |
| | | KRTVAAPSVFIFPPSDEQLKSGTASVVCLLNNFYPREAKVQWKVDNALQSGNSQE | |
| | | SVTEQDSKDSTYSLSSTLTLSKADYEKHKVYACEVTHQGLSSPVTKSFNRGEC | |
| iPS:361236 | 5C2.008 | DIVMTQSPDSLAVSLGERATINCKSSQSVLSSSNNKNYIAWYQQQPGHPPKLLIYW | 402 |
| | | ASTRESGVPDRFSGSGSGTDFTLTISSLQAEDVAVFYCQQYYSTPWTFGQGTKVEI | |
| | | KRTVAAPSVFIFPPSDEQLKSGTASVVCLLNNFYPREAKVQWKVDNALQSGNSQE | |
| | | SVTEQDSKDSTYSLSSTLTLSKADYEKHKVYACEVTHQGLSSPVTKSFNRGEC | |
| iPS:359685 | 5C2.009 | DIVMTQSPDSLAVSLGERATINCKSSQSVLSSSNNKNYIAWYQQQPGHPPKLLIYW | 403 |
| | | ASTRESGVPDRFSGSGSGTDFTLTISSLQAEDVAVFYCQQYYSTPWTFGQGTKVEI | |
| | | KRTVAAPSVFIFPPSDEQLKSGTASVVCLLNNFYPREAKVQWKVDNALQSGNSQE | |
| | | SVTEQDSKDSTYSLSSTLTLSKADYEKHKVYACEVTHQGLSSPVTKSFNRGEC | |
| iPS:361240 | 5C2.010 | DIVMTQSPDSLAVSLGERATINCKSSQSVLSSSNNKNYIAWYQQQPGHPPKLLIYW | 404 |
| | | ASTRESGVPDRFSGSGSGTDFTLTISSLQAEDVAVFYCQQYYSTPWTFGQGTKVEI | |
| | | KRTVAAPSVFIFPPSDEQLKSGTASVVCLLNNFYPREAKVQWKVDNALQSGNSQE | |
| | | SVTEQDSKDSTYSLSSTLTLSKADYEKHKVYACEVTHQGLSSPVTKSFNRGEC | |
| iPS:361247 | 5C2.011 | DIVMTQSPDSLAVSLGERATINCKSSQSVLSSSNNKNYIAWYQQQPGHPPKLLIYW | 405 |
| | | ASTRESGVPDRFSGSGSGTDFTLTISSLQAEDVAVFYCQQYYSTPWTFGQGTKVEI | |
| | | KRTVAAPSVFIFPPSDEQLKSGTASVVCLLNNFYPREAKVQWKVDNALQSGNSQE | |
| | | SVTEQDSKDSTYSLSSTLTLSKADYEKHKVYACEVTHQGLSSPVTKSFNRGEC | |
| iPS:361254 | 5C2.012 | DIVMTQSPDSLAVSLGERATINCKSSQSVLSSSNNKNYIAWYQQQPGHPPKLLIYW | 406 |
| | | ASTRESGVPDRFSGSGSGTDFTLTISSLQAEDVAVFYCQQYYSTPWTFGQGTKVEI | |
| | | KRTVAAPSVFIFPPSDEQLKSGTASVVCLLNNFYPREAKVQWKVDNALQSGNSQE | |
| | | SVTEQDSKDSTYSLSSTLTLSKADYEKHKVYACEVTHQGLSSPVTKSFNRGEC | |
| iPS:361261 | 5C2.013 | DIVMTQSPDSLAVSLGERATINCKSSQSVLSSSNNKNYIAWYQQQPGHPPKLLIYW | 407 |
| | | ASTRESGVPDRFSGSGSGTDFTLTISSLQAEDVAVFYCQQYYSTPWTFGQGTKVEI | |
| | | KRTVAAPSVFIFPPSDEQLKSGTASVVCLLNNFYPREAKVQWKVDNALQSGNSQE | |
| | | SVTEQDSKDSTYSLSSTLTLSKADYEKHKVYACEVTHQGLSSPVTKSFNRGEC | |
| iPS:361268 | 5C2.014 | DIVMTQSPDSLAVSLGERATINCKSSQSVLSSSNNKNYIAWYQQQPGHPPKLLIYW | 408 |
| | | ASTRESGVPDRFSGSGSGTDFTLTISSLQAEDVAVFYCQQYYSTPWTFGQGTKVEI | |
| | | KRTVAAPSVFIFPPSDEQLKSGTASVVCLLNNFYPREAKVQWKVDNALQSGNSQE | |
| | | SVTEQDSKDSTYSLSSTLTLSKADYEKHKVYACEVTHQGLSSPVTKSFNRGEC | |
| iPS:359669 | 5C2.015 | DIVMTQSPDSLAVSLGERATINCKSSQSVLSSSNNKNYIAWYQQKPGQPPKLLIYW | 409 |
| | | ASTRESGVPDRFSGSGSGTDFTLTISSLQAEDVAVFYCQQYYSTPWTFGQGTKVEI | |
| | | KRTVAAPSVFIFPPSDEQLKSGTASVVCLLNNFYPREAKVQWKVDNALQSGNSQE | |
| | | SVTEQDSKDSTYSLSSTLTLSKADYEKHKVYACEVTHQGLSSPVTKSFNRGEC | |
| iPS:359678 | 5C2.016 | DIVMTQSPDSLAVSLGERATINCKSSQSVLSSSNNKNYIAWYQQKPGQPPKLLIYW | 410 |
| | | ASTRESGVPDRFSGSGSGTDFTLTISSLQAEDVAVFYCQQYYSTPWTFGQGTKVEI | |
| | | KRTVAAPSVFIFPPSDEQLKSGTASVVCLLNNFYPREAKVQWKVDNALQSGNSQE | |
| | | SVTEQDSKDSTYSLSSTLTLSKADYEKHKVYACEVTHQGLSSPVTKSFNRGEC | |
| iPS:361275 | 11C1.002 | DIVMTQSPDSLSVSLGERATINCKSSQSVLSSSNNKNYLAWYQQKPGQPPNLLIYW | 411 |
| | | TSTRESGVPDRFSGSGSGTDFTLTINSLQAEDVAVYYCQQYYRTPWTFGQGTKVEI | |
| | | KRTVAAPSVFIFPPSDEQLKSGTASVVCLLNNFYPREAKVQWKVDNALQSGNSQE | |
| | | SVTEQDSKDSTYSLSSTLTLSKADYEKHKVYACEVTHQGLSSPVTKSFNRGEC | |
| iPS:361282 | 11C1.003 | DIVMTQSPDSLSVSLGERATINCKSSQSVLSSSNNKNYLAWYQQKPGQPPNLLIYW | 412 |
| | | TSTRESGVPDRFSGSGSGTDFTLTINSLQAEDVAVYYCQQYYRTPWTFGQGTKVEI | |
| | | KRTVAAPSVFIFPPSDEQLKSGTASVVCLLNNFYPREAKVQWKVDNALQSGNSQE | |
| | | SVTEQDSKDSTYSLSSTLTLSKADYEKHKVYACEVTHQGLSSPVTKSFNRGEC | |
| iPS:361289 | 11C1.004 | DIVMTQSPDSLSVSLGERATINCKSSQSVLSSSNNKNYLAWYQQKPGQPPNLLIYW | 413 |
| | | TSTRDSGVPDRFSGSGSGTDFTLTINSLQAEDVAVYYCQQYYRTPWTFGQGTKVEI | |
| | | KRTVAAPSVFIFPPSDEQLKSGTASVVCLLNNFYPREAKVQWKVDNALQSGNSQE | |
| | | SVTEQDSKDSTYSLSSTLTLSKADYEKHKVYACEVTHQGLSSPVTKSFNRGEC | |
| iPS:359712 | 11C1.005 | DIVMTQSPDSLSVSLGERATINCKSSQSVLSSSNNKNYLAWYQQKPGQPPNLLIYW | 414 |
| | | TSTRESGVPDRFSGSGSGTDFTLTINSLQAEDVAVYYCQQYYRTPWTFGQGTKVEI | |
| | | KRTVAAPSVFIFPPSDEQLKSGTASVVCLLNNFYPREAKVQWKVDNALQSGNSQE | |
| | | SVTEQDSKDSTYSLSSTLTLSKADYEKHKVYACEVTHQGLSSPVTKSFNRGEC | |
| iPS:361293 | 11C1.006 | DIVMTQSPDSLSVSLGERATINCKSSQSVLSSSNNKNYLAWYQQKPGQPPNLLIYW | 415 |
| | | TSTRESGVPDRFSGSGSGTDFTLTINSLQAEDVAVYYCQQYYRTPWTFGQGTKVEI | |
| | | KRTVAAPSVFIFPPSDEQLKSGTASVVCLLNNFYPREAKVQWKVDNALQSGNSQE | |
| | | SVTEQDSKDSTYSLSSTLTLSKADYEKHKVYACEVTHQGLSSPVTKSFNRGEC | |
| iPS:361297 | 11C1.007 | DIVMTQSPDSLSVSLGERATINCKSSQSVLSSSNNKNYLAWYQQKPGQPPNLLIYW | 416 |
| | | TSTRDSGVPDRFSGSGSGTDFTLTINSLQAEDVAVYYCQQYYRTPWTFGQGTKVEI | |
| | | KRTVAAPSVFIFPPSDEQLKSGTASVVCLLNNFYPREAKVQWKVDNALQSGNSQE | |
| | | SVTEQDSKDSTYSLSSTLTLSKADYEKHKVYACEVTHQGLSSPVTKSFNRGEC | |
| iPS:361301 | 11C1.008 | DIVMTQSPDSLSVSLGERATINCKSSQSVLSSSNNKNYLAWYQQKPGQPPNLLIYW | 417 |
| | | TSTRDSGVPDRFSGSGSGTDFTLTINSLQAEDVAVYYCQQYYRTPWTFGQGTKVEI | |
| | | KRTVAAPSVFIFPPSDEQLKSGTASVVCLLNNFYPREAKVQWKVDNALQSGNSQE | |
| | | SVTEQDSKDSTYSLSSTLTLSKADYEKHKVYACEVTHQGLSSPVTKSFNRGEC | |
| iPS:359703 | 11C1.009 | DIVMTQSPDSLAVSLGERATINCKSSQSVLSSSNNKNYLAWYQQKPGQPPKLLIYW | 418 |
| | | TSTRESGVPDRFSGSGSGTDFTLTINSLQAEDVAVYYCQQYYRTPWTFGQGTKVEI | |
| | | KRTVAAPSVFIFPPSDEQLKSGTASVVCLLNNFYPREAKVQWKVDNALQSGNSQE | |
| | | SVTEQDSKDSTYSLSSTLTLSKADYEKHKVYACEVTHQGLSSPVTKSFNRGEC | |
| iPS:361305 | 11C1.010 | DIVMTQSPDSLSVSLGERATINCKSSQSVLSSSNNKNYLAWYQQKPGQPPNLLIYW | 419 |
| | | TSTRESGVPDRFSGSGSGTDFTLTINSLQAEDVAVYYCQQYYRTPWTFGQGTKVEI | |
| | | KRTVAAPSVFIFPPSDEQLKSGTASVVCLLNNFYPREAKVQWKVDNALQSGNSQE | |
| | | SVTEQDSKDSTYSLSSTLTLSKADYEKHKVYACEVTHQGLSSPVTKSFNRGEC | |
| iPS:361312 | 13H12.002 | DIVMTQSPDSLAVSLGERATINCKSSQSVLSSSNNKNYIAWYQQKPGHPPKLLIYW | 420 |
| | | ASTRESGVPDRFSGSGSGTDFTLTISSLQAEDVAVFYCQQYYSTPWTFGQGTKVEI | |
| | | KRTVAAPSVFIFPPSDEQLKSGTASVVCLLNNFYPREAKVQWKVDNALQSGNSQE | |
| | | SVTEQDSKDSTYSLSSTLTLSKADYEKHKVYACEVTHQGLSSPVTKSFNRGEC | |
| iPS:359744 | 13H12.003 | DIVMTQSPDSLAVSLGERATINCKSSQSVLSSSNNKNYIAWYQQKPGHPPKLLIYW | 421 |
| | | ASTRESGVPDRFSGSGSGTDFTLTISSLQAEDVAVFYCQQYYSTPWTFGQGTKVEI | |
| | | KRTVAAPSVFIFPPSDEQLKSGTASVVCLLNNFYPREAKVQWKVDNALQSGNSQE | |
| | | SVTEQDSKDSTYSLSSTLTLSKADYEKHKVYACEVTHQGLSSPVTKSFNRGEC | |
| iPS:361319 | 13H12.004 | DIVMTQSPDSLAVSLGERATINCKSSQSVLSSSNNKNYIAWYQQKPGHPPKLLIYW | 422 |
| | | ASTRESGVPDRFSGSGSGTDFTLTISSLQAEDVAVFYCQQYYSTPWTFGQGTKVEI | |
| | | KRTVAAPSVFIFPPSDEQLKSGTASVVCLLNNFYPREAKVQWKVDNALQSGNSQE | |
| | | SVTEQDSKDSTYSLSSTLTLSKADYEKHKVYACEVTHQGLSSPVTKSFNRGEC | |
| iPS:359737 | 13H12.005 | DIVMTQSPDSLAVSLGERATINCKSSQSVLSSSNNKNYIAWYQQKPGQPPKLLIYW | 423 |
| | | ASTRESGVPDRFSGSGSGTDFTLTISSLQAEDVAVFYCQQYYSTPWTFGQGTKVEI | |
| | | KRTVAAPSVFIFPPSDEQLKSGTASVVCLLNNFYPREAKVQWKVDNALQSGNSQE | |
| | | SVTEQDSKDSTYSLSSTLTLSKADYEKHKVYACEVTHQGLSSPVTKSFNRGEC | |
| iPS:361326 | 13H12.006 | DIVMTQSPDSLAVSLGERATINCKSSQSVLSSSNNKNYIAWYQQKPGQPPKLLIYW | 424 |
| | | ASTRESGVPDRFSGSGSGTDFTLTISSLQAEDVAVFYCQQYYSTPWTFGQGTKVEI | |
| | | KRTVAAPSVFIFPPSDEQLKSGTASVVCLLNNFYPREAKVQWKVDNALQSGNSQE | |
| | | SVTEQDSKDSTYSLSSTLTLSKADYEKHKVYACEVTHQGLSSPVTKSFNRGEC | |
| iPS:361330 | 12H11.002 | DIVMTQSPDSLSVSLGERATINCKSSQSVLSSSNNKNYLAWYQQKPGQPPNLLIYW | 425 |
| | | TSTRDSGVPDRFSGSGSGTDFTLTINSLQAEDVAVYYCQQYYRTPWTFGQGTKVEI | |
| | | KRTVAAPSVFIFPPSDEQLKSGTASVVCLLNNFYPREAKVQWKVDNALQSGNSQE | |
| | | SVTEQDSKDSTYSLSSTLTLSKADYEKHKVYACEVTHQGLSSPVTKSFNRGEC | |
| iPS:361337 | 12H11.003 | DIVMTQSPDSLSVSLGERATINCKSSQSVLSSSNNKNYLAWYQQKPGQPPNLLIYW | 426 |
| | | TSTRDSGVPDRFSGSGSGTDFTLTINSLQAEDVAVYYCQQYYRTPWTFGQGTKVEI | |
| | | KRTVAAPSVFIFPPSDEQLKSGTASVVCLLNNFYPREAKVQWKVDNALQSGNSQE | |
| | | SVTEQDSKDSTYSLSSTLTLSKADYEKHKVYACEVTHQGLSSPVTKSFNRGEC | |
| iPS:361344 | 12H11.004 | DIVMTQSPDSLSVSLGERATINCKSSQSVLSSSNNKNYLAWYQQKPGQPPNLLIYW | 427 |
| | | TSTRDSGVPDRFSGSGSGTDFTLTINSLQAEDVAVYYCQQYYRTPWTFGQGTKVEI | |
| | | KRTVAAPSVFIFPPSDEQLKSGTASVVCLLNNFYPREAKVQWKVDNALQSGNSQE | |
| | | SVTEQDSKDSTYSLSSTLTLSKADYEKHKVYACEVTHQGLSSPVTKSFNRGEC | |
| iPS:361351 | 12H11.005 | DIVMTQSPDSLSVSLGERATINCKSSQSVLSSSNNKNYLAWYQQKPGQPPNLLIYW | 428 |
| | | TSTRDSGVPDRFSGSGSGTDFTLTINSLQAEDVAVYYCQQYYRTPWTFGQGTKVEI | |
| | | KRTVAAPSVFIFPPSDEQLKSGTASVVCLLNNFYPREAKVQWKVDNALQSGNSQE | |
| | | SVTEQDSKDSTYSLSSTLTLSKADYEKHKVYACEVTHQGLSSPVTKSFNRGEC | |
| iPS:361358 | 12H11.006 | DIVMTQSPDSLSVSLGERATINCKSSQSVLSSSNNKNYLAWYQQKPGQPPNLLIYW | 429 |
| | | TSTRDSGVPDRFSGSGSGTDFTLTINSLQAEDVAVYYCQQYYRTPWTFGQGTKVEI | |
| | | KRTVAAPSVFIFPPSDEQLKSGTASVVCLLNNFYPREAKVQWKVDNALQSGNSQE | |
| | | SVTEQDSKDSTYSLSSTLTLSKADYEKHKVYACEVTHQGLSSPVTKSFNRGEC | |
| iPS:361365 | 12H11.007 | DIVMTQSPDSLSVSLGERATINCKSSQSVLSSSNNKNYLAWYQQKPGQPPNLLIYW | 430 |
| | | TSTRDSGVPDRFSGSGSGTDFTLTINSLQAEDVAVYYCQQYYRTPWTFGQGTKVEI | |
| | | KRTVAAPSVFIFPPSDEQLKSGTASVVCLLNNFYPREAKVQWKVDNALQSGNSQE | |
| | | SVTEQDSKDSTYSLSSTLTLSKADYEKHKVYACEVTHQGLSSPVTKSFNRGEC | |
| iPS:361372 | 12H11.008 | DIVMTQSPDSLSVSLGERATINCKSSQSVLSSSNNKNYLAWYQQKPGQPPNLLIYW | 431 |
| | | TSTRDSGVPDRFSGSGSGTDFTLTINSLQAEDVAVYYCQQYYRTPWTFGQGTKVEI | |
| | | KRTVAAPSVFIFPPSDEQLKSGTASVVCLLNNFYPREAKVQWKVDNALQSGNSQE | |
| | | SVTEQDSKDSTYSLSSTLTLSKADYEKHKVYACEVTHQGLSSPVTKSFNRGEC | |
| iPS:361379 | 12H11.009 | DIVMTQSPDSLSVSLGERATINCKSSQSVLSSSNNKNYLAWYQQKPGQPPNLLIYW | 432 |
| | | TSTRESGVPDRFSGSGSGTDFTLTINSLQAEDVAVYYCQQYYRTPWTFGQGTKVEI | |
| | | KRTVAAPSVFIFPPSDEQLKSGTASVVCLLNNFYPREAKVQWKVDNALQSGNSQE | |
| | | SVTEQDSKDSTYSLSSTLTLSKADYEKHKVYACEVTHQGLSSPVTKSFNRGEC | |
| iPS:361383 | 12H11.010 | DIVMTQSPDSLSVSLGERATINCKSSQSVLSSSNNKNYLAWYQQKPGQPPNLLIYW | 433 |
| | | TSTRESGVPDRFSGSGSGTDFTLTINSLQAEDVAVYYCQQYYRTPWTFGQGTKVEI | |
| | | KRTVAAPSVFIFPPSDEQLKSGTASVVCLLNNFYPREAKVQWKVDNALQSGNSQE | |
| | | SVTEQDSKDSTYSLSSTLTLSKADYEKHKVYACEVTHQGLSSPVTKSFNRGEC | |
| iPS:361387 | 12H11.011 | DIVMTQSPDSLSVSLGERATINCKSSQSVLSSSNNKNYLAWYQQKPGQPPNLLIYW | 434 |
| | | TSTRESGVPDRFSGSGSGTDFTLTINSLQAEDVAVYYCQQYYRTPWTFGQGTKVEI | |
| | | KRTVAAPSVFIFPPSDEQLKSGTASVVCLLNNFYPREAKVQWKVDNALQSGNSQE | |
| | | SVTEQDSKDSTYSLSSTLTLSKADYEKHKVYACEVTHQGLSSPVTKSFNRGEC | |
| iPS:361391 | 12H11.012 | DIVMTQSPDSLSVSLGERATINCKSSQSVLSSSNNKNYLAWYQQKPGQPPNLLIYW | 435 |
| | | TSTRESGVPDRFSGSGSGTDFTLTINSLQAEDVAVYYCQQYYRTPWTFGQGTKVEI | |
| | | KRTVAAPSVFIFPPSDEQLKSGTASVVCLLNNFYPREAKVQWKVDNALQSGNSQE | |
| | | SVTEQDSKDSTYSLSSTLTLSKADYEKHKVYACEVTHQGLSSPVTKSFNRGEC | |
| iPS:361395 | 12H11.013 | DIVMTQSPDSLAVSLGERATINCKSSQSVLSSSNNKNYLAWYQQKPGQPPKLLIYW | 436 |
| | | TSTRDSGVPDRFSGSGSGTDFTLTINSLQAEDVAVYYCQQYYRTPWTFGQGTKVEI | |
| | | KRTVAAPSVFIFPPSDEQLKSGTASVVCLLNNFYPREAKVQWKVDNALQSGNSQE | |
| | | SVTEQDSKDSTYSLSSTLTLSKADYEKHKVYACEVTHQGLSSPVTKSFNRGEC | |
| iPS:361402 | 12H11.014 | DIVMTQSPDSLAVSLGERATINCKSSQSVLSSSNNKNYLAWYQQKPGQPPKLLIYW | 437 |
| | | TSTRESGVPDRFSGSGSGTDFTLTINSLQAEDVAVYYCQQYYRTPWTFGQGTKVEI | |
| | | KRTVAAPSVFIFPPSDEQLKSGTASVVCLLNNFYPREAKVQWKVDNALQSGNSQE | |
| | | SVTEQDSKDSTYSLSSTLTLSKADYEKHKVYACEVTHQGLSSPVTKSFNRGEC | |
| iPS:361406 | 2C2.005.001 | QSVLTQPPSASGTPGQRVTISCSGSSSNIGSQTVNWYQHLPGTAPKLLIYTNNQRPS | 438 |
| | | GVPDRFSGSKSGTSASLAISGLQSEDEADYFCATFDESLSGPVFGGGTKLTVLGQPK | |
| | | AAPSVTLFPPSSEELQANKATLVCLISDFYPGAVTVAWKADSSPVKAGVETTTPSK | |
| | | QSNNKYAASSYLSLTPEQWKSHRSYSCQVTHEGSTVEKTVAPTECS | |
| iPS:361412 | 2C2.005.002 | QSVLTQPPSASGTPGQRVTISCSGSSSNIGSQTVNWYQHLPGTAPKLLIYTNNQRPS | 439 |
| | | GVPDRFSGSKSGTSASLAISGLQSEDEADYFCATFDESLQGPVFGGGTKLTVLGQP | |
| | | KAAPSVTLFPPSSEELQANKATLVCLISDFYPGAVTVAWKADSSPVKAGVETTTPS | |
| | | KQSNNKYAASSYLSLTPEQWKSHRSYSCQVTHEGSTVEKTVAPTECS | |
| iPS:361418 | 2C2.005.003 | QSVLTQPPSASGTPGQRVTISCSGSSSNIGSNYVNWYQHLPGTAPKLLIYTNNQRPS | 440 |
| | | GVPDRFSGSKSGTSASLAISGLQSEDEADYFCATFDESLSGPVFGGGTKLTVLGQPK | |
| | | AAPSVTLFPPSSEELQANKATLVCLISDFYPGAVTVAWKADSSPVKAGVETTTPSK | |
| | | QSNNKYAASSYLSLTPEQWKSHRSYSCQVTHEGSTVEKTVAPTECS | |
| iPS:361424 | 2C2.005.004 | QSVLTQPPSASGTPGQRVTISCSGSSSNIGSNYVNWYQHLPGTAPKLLIYTNNQRPS | 441 |
| | | GVPDRFSGSKSGTSASLAISGLQSEDEADYFCATFDESLQGPVFGGGTKLTVLGQP | |
| | | KAAPSVTLFPPSSEELQANKATLVCLISDFYPGAVTVAWKADSSPVKAGVETTTPS | |
| | | KQSNNKYAASSYLSLTPEQWKSHRSYSCQVTHEGSTVEKTVAPTECS | |
| iPS:361430 | 2C2.005.005 | QSVLTQPPSASGTPGQRVTISCSGSSSNIGSQTVNWYQHLPGTAPKLLIYTNNQRPS | 442 |
| | | GVPDRFSGSKSGTSASLAISGLQSEDEADYFCATFDDSLNGPVFGGGTKLTVLGQP | |
| | | KAAPSVTLFPPSSEELQANKATLVCLISDFYPGAVTVAWKADSSPVKAGVETTTPS | |
| | | KQSNNKYAASSYLSLTPEQWKSHRSYSCQVTHEGSTVEKTVAPTECS | |
| iPS:361436 | 2C2.005.006 | QSVLTQPPSASGTPGQRVTISCSGSSSNIGSNYVNWYQHLPGTAPKLLIYTNNQRPS | 443 |
| | | GVPDRFSGSKSGTSASLAISGLQSEDEADYFCATFDDSLNGPVFGGGTKLTVLGQP | |
| | | KAAPSVTLFPPSSEELQANKATLVCLISDFYPGAVTVAWKADSSPVKAGVETTTPS | |
| | | KQSNNKYAASSYLSLTPEQWKSHRSYSCQVTHEGSTVEKTVAPTECS | |
| iPS:361442 | 2C2.005.007 | QSVLTQPPSASGTPGQRVTISCSGSSSNIGSNTVNWYQHLPGTAPKLLIYTNNQRPS | 444 |
| | | GVPDRFSGSKSGTSASLAISGLQSEDEADYFCATFDESLNGPVFGGGTKLTVLGQP | |
| | | KAAPSVTLFPPSSEELQANKATLVCLISDFYPGAVTVAWKADSSPVKAGVETTTPS | |
| | | KQSNNKYAASSYLSLTPEQWKSHRSYSCQVTHEGSTVEKTVAPTECS | |
| iPS:361448 | 2C2.005.008 | QSVLTQPPSASGTPGQRVTISCSGSSSNIGSNTVNWYQHLPGTAPKLLIYTNNQRPS | 445 |
| | | GVPDRFSGSKSGTSASLAISGLQSEDEADYFCATFDDSLQGPVFGGGTKLTVLGQP | |
| | | KAAPSVTLFPPSSEELQANKATLVCLISDFYPGAVTVAWKADSSPVKAGVETTTPS | |
| | | KQSNNKYAASSYLSLTPEQWKSHRSYSCQVTHEGSTVEKTVAPTECS | |
| iPS:361454 | 2C2.005.009 | QSVLTQPPSASGTPGQRVTISCSGSSSNIGSNTVNWYQHLPGTAPKLLIYTNNQRPS | 446 |
| | | GVPDRFSGSKSGTSASLAISGLQSEDEADYFCATFDDSLSGPVFGGGTKLTVLGQP | |
| | | KAAPSVTLFPPSSEELQANKATLVCLISDFYPGAVTVAWKADSSPVKAGVETTTPS | |
| | | KQSNNKYAASSYLSLTPEQWKSHRSYSCQVTHEGSTVEKTVAPTECS | |
| iPS:361460 | 2C2.005.010 | QSVLTQPPSASGTPGQRVTISCSGSSSNIGSNTVNWYQHLPGTAPKLLIYTNNQRPS | 447 |
| | | GVPDRFSGSKSGTSASLAISGLQSEDEADYFCATFDDSLNAPVFGGGTKLTVLGQP | |
| | | KAAPSVTLFPPSSEELQANKATLVCLISDFYPGAVTVAWKADSSPVKAGVETTTPS | |
| | | KQSNNKYAASSYLSLTPEQWKSHRSYSCQVTHEGSTVEKTVAPTECS | |
| iPS:361466 | 2C2.005.011 | QSVLTQPPSASGTPGQRVTISCSGSSSNIGSNTVNWYQHLPGTAPKLLIYTNNQRPS | 448 |
| | | GVPDRFSGSKSGTSASLAISGLQSEDEADYFCATFDSSLNGPVFGGGTKLTVLGQP | |
| | | KAAPSVTLFPPSSEELQANKATLVCLISDFYPGAVTVAWKADSSPVKAGVETTTPS | |
| | | KQSNNKYAASSYLSLTPEQWKSHRSYSCQVTHEGSTVEKTVAPTECS | |
| iPS:361472 | 2C2.005.012 | QSVLTQPPSASGTPGQRVTISCSGSSSNIGSNYVNWYQHLPGTAPKLLIYTNNQRPS | 449 |
| | | GVPDRFSGSKSGTSASLAISGLQSEDEADYFCATFDSSLNAPVFGGGTKLTVLGQP | |
| | | KAAPSVTLFPPSSEELQANKATLVCLISDFYPGAVTVAWKADSSPVKAGVETTTPS | |
| | | KQSNNKYAASSYLSLTPEQWKSHRSYSCQVTHEGSTVEKTVAPTECS | |
| iPS:361478 | 2C2.005.013 | QSVLTQPPSASGTPGQRVTISCSGSSSNIGSNYVNWYQHLPGTAPKLLIYTNNQRPS | 450 |
| | | GVPDRFSGSKSGTSASLAISGLQSEDEADYFCATFDSSLNAPVFGGGTKLTVLGQP | |
| | | KAAPSVTLFPPSSEELQANKATLVCLISDFYPGAVTVAWKADSSPVKAGVETTTPS | |
| | | KQSNNKYAASSYLSLTPEQWKSHRSYSCQVTHEGSTVEKTVAPTECS | |
| iPS:361485 | 2C2.005.014 | QSVLTQPPSASGTPGQRVTISCSGSSSNIGSQTVNWYQHLPGTAPKLLIYTNNQRPS | 451 |
| | | GVPDRFSGSKSGTSASLAISGLQSEDEADYFCATFDESLSGPVFGGGTKLTVLGQPK | |
| | | AAPSVTLFPPSSEELQANKATLVCLISDFYPGAVTVAWKADSSPVKAGVETTTPSK | |
| | | QSNNKYAASSYLSLTPEQWKSHRSYSCQVTHEGSTVEKTVAPTECS | |
| iPS:361845 | 18F2.013 | DIQMTQSPSSLSASIGDRVTITCRASQDLRNYLGWYQQKPGKAPKRLIYGASSLQS | 452 |
| | | GVPSRFSGSGSGTEFTLTISSLQPEDFATYYCLQHNNYPFTFGQGTKVDIKRTVAAP | |
| | | SVFIFPPSDEQLKSGTASVVCLLNNFYPREAKVQWKVDNALQSGNSQESVTEQDS | |
| | | KDSTYSLSSTLTLSKADYEKHKVYACEVTHQGLSSPVTKSFNRGEC | |
| iPS:361851 | 6H1.009 | DIQMTQSPSSLSASIGDRVTITCRASQDIRDYLGWYQQKPGKAPKRLIYGASSLQSG | 453 |
| | | VPSRFSGSGSGTEFTLTISSLQPEDFATYYCLQHNNYPFTFGQGTKVDIKRTVAAPS | |
| | | VFIFPPSDEQLKSGTASVVCLLNNFYPREAKVQWKVDNALQSGNSQESVTEQDSK | |
| | | DSTYSLSSTLTLSKADYEKHKVYACEVTHQGLSSPVTKSFNRGEC | |
| iPS:361855 | 2C2.005.015 | QSVLTQPPSASGTPGQRVTISCSGSSSNIGSNTVNWYQQLPGTAPKLLIYTNNQRPS | 454 |
| | | GVPDRFSGSKSGTSASLAISGLQSEDEADYFCATFDSSLSGPVFGGGTKLTVLGQPK | |
| | | AAPSVTLFPPSSEELQANKATLVCLISDFYPGAVTVAWKADSSPVKAGVETTTPSK | |
| | | QSNNKYAASSYLSLTPEQWKSHRSYSCQVTHEGSTVEKTVAPTECS | |
| iPS:336067 | 5G12.006 | DIQLTQSPSSLSASVGDRVTITCRASQTISRFLNWYQQKPGKAPELLIYVASSLQSG | 455 |
| | | VPSRFSGSGSGTDFTLTISSLQPEDFATYYCQQSYSTLISFGQGTKLEITRTVAAPSV | |
| | | FIFPPSDEQLKSGTASVVCLLNNFYPREAKVQWKVDNALQSGNSQESVTEQDSKD | |
| | | STYSLSSTLTLSKADYEKHKVYACEVTHQGLSSPVTKSFNRGEC | |
| iPS:336169 | 17B11.002 | QSVLTQPPSVSAAPGQKVTISCSGSSSNIGNNYVSWYEQFPGTAPKLLIYDNNKRPS | 456 |
| | | GIPDRFSGSKSGTSATLGITGLQTGDEADYYCGTWDSSLSAVVFGGGTKLTVLGQP | |
| | | KAAPSVTLFPPSSEELQANKATLVCLISDFYPGAVTVAWKADSSPVKAGVETTTPS | |
| | | KQSNNKYAASSYLSLTPEQWKSHRSYSCQVTHEGSTVEKTVAPTECS | |
| iPS:361127 | 5G12.006.001 | DIQLTQSPSSLSASVGDRVTITCRASQTISRFLNWYQQKPGKAPELLIYVASSLQSG | 457 |
| | | VPSRFSGSGSGTDFTLTISSLQPEDFATYYCQQSYSTLISFGQGTKLEIKRTVAAPSV | |
| | | FIFPPSDEQLKSGTASVVCLLNNFYPREAKVQWKVDNALQSGNSQESVTEQDSKD | |
| | | STYSLSSTLTLSKADYEKHKVYACEVTHQGLSSPVTKSFNRGEC | |
| iPS:361136 | 5G12.006.002 | DIQLTQSPSSLSASVGDRVTITCRASQTISRFLNWYQQKPGKAPELLIYVASSLQSG | 458 |
| | | VPSRFSGSGSGTDFTLTISSLQPEDFATYYCQQSYSTLISFGQGTKLEIKRTVAAPSV | |
| | | FIFPPSDEQLKSGTASVVCLLNNFYPREAKVQWKVDNALQSGNSQESVTEQDSKD | |
| | | STYSLSSTLTLSKADYEKHKVYACEVTHQGLSSPVTKSFNRGEC | |
| iPS:361140 | 5G12.006.003 | DIQLTQSPSSLSASVGDRVTITCRASQTISRFLNWYQQKPGKAPELLIYVASSLQSG | 459 |
| | | VPSRFSGSGSGTDFTLTISSLQPEDFATYYCQQSYSTLISFGQGTKLEITRTVAAPSV | |
| | | FIFPPSDEQLKSGTASVVCLLNNFYPREAKVQWKVDNALQSGNSQESVTEQDSKD | |
| | | STYSLSSTLTLSKADYEKHKVYACEVTHQGLSSPVTKSFNRGEC | |
| iPS:359919 | 5G12.006.004 | DIQLTQSPSSLSASVGDRVTITCRASQTISRFLNWYQQKPGKAPKLLIYVASSLQSG | 460 |
| | | VPSRFSGSGSGTDFTLTISSLQPEDFATYYCQQSYSTLISFGQGTKLEIKRTVAAPSV | |
| | | FIFPPSDEQLKSGTASVVCLLNNFYPREAKVQWKVDNALQSGNSQESVTEQDSKD | |
| | | STYSLSSTLTLSKADYEKHKVYACEVTHQGLSSPVTKSFNRGEC | |
| iPS:361144 | 5G12.006.005 | DIQLTQSPSSLSASVGDRVTITCRASQTISRFLNWYQQKPGKAPELLIYVASSLQSG | 461 |
| | | VPSRFSGSGSGTDFTLTISSLQPEDFATYYCQQSYSTLISFGQGTKLEIKRTVAAPSV | |
| | | FIFPPSDEQLKSGTASVVCLLNNFYPREAKVQWKVDNALQSGNSQESVTEQDSKD | |
| | | STYSLSSTLTLSKADYEKHKVYACEVTHQGLSSPVTKSFNRGEC | |
| iPS:361151 | 5G12.006.006 | DIQLTQSPSSLSASVGDRVTITCRASQTISRFLNWYQQKPGKAPELLIYVASSLQSG | 462 |
| | | VPSRFSGSGSGTDFTLTISSLQPEDFATYYCQQSYSTLISFGQGTKLEIKRTVAAPSV | |
| | | FIFPPSDEQLKSGTASVVCLLNNFYPREAKVQWKVDNALQSGNSQESVTEQDSKD | |
| | | STYSLSSTLTLSKADYEKHKVYACEVTHQGLSSPVTKSFNRGEC | |
| iPS:361491 | 17B11.002.001 | QSVLTQPPSVSAAPGQKVTISCSGSSSNIGNNYVSWYQQLPGTAPKLLIYDNNKRPS | 463 |
| | | GIPDRFSGSKSGTSATLGITGLQTGDEADYYCGTWDSSLSAVVFGGGTKLTVLGQP | |
| | | KAAPSVTLFPPSSEELQANKATLVCLISDFYPGAVTVAWKADSSPVKAGVETTTPS | |
| | | KQSNNKYAASSYLSLTPEQWKSHRSYSCQVTHEGSTVEKTVAPTECS | |
| iPS:361499 | 17B11.002.002 | QSVLTQPPSVSAAPGQKVTISCSGSSSNIGNNYVSWYQQLPGTAPKLLIYDNNKRPS | 464 |
| | | GIPDRFSGSKSGTSATLGITGLQTGDEADYYCGTWDSSLSAVVFGGGTKLTVLGQP | |
| | | KAAPSVTLFPPSSEELQANKATLVCLISDFYPGAVTVAWKADSSPVKAGVETTTPS | |
| | | KQSNNKYAASSYLSLTPEQWKSHRSYSCQVTHEGSTVEKTVAPTECS | |
| iPS:361503 | 17B11.002.003 | QSVLTQPPSVSAAPGQKVTISCSGSSSNIGNNYVSWYEQFPGTAPKLLIYDNNKRPS | 465 |
| | | GIPDRFSGSKSGTSATLGITGLQTGDEADYYCGTWDSSLSAVVFGGGTKLTVLGQP | |
| | | KAAPSVTLFPPSSEELQANKATLVCLISDFYPGAVTVAWKADSSPVKAGVETTTPS | |
| | | KQSNNKYAASSYLSLTPEQWKSHRSYSCQVTHEGSTVEKTVAPTECS | |
| iPS:361507 | 17B11.002.004 | QSVLTQPPSVSAAPGQKVTISCSGSSSNIGNNYVSWYQQLPGTAPKLLIYDNNKRPS | 466 |
| | | GIPDRFSGSKSGTSATLAITGLQTGDEADYYCGTFESSLSAVVFGGGTKLTVLGQP | |
| | | KAAPSVTLFPPSSEELQANKATLVCLISDFYPGAVTVAWKADSSPVKAGVETTTPS | |
| | | KQSNNKYAASSYLSLTPEQWKSHRSYSCQVTHEGSTVEKTVAPTECS | |
| iPS:361514 | 17B11.002.005 | QSVLTQPPSVSAAPGQKVTISCSGSSSNIGNNYVSWYQQLPGTAPKLLIYDNNKRPS | 467 |
| | | GIPDRFSGSKSGTSATLAITGLQTGDEADYYCGTWDSSLSAVVFGGGTKLTVLGQP | |
| | | KAAPSVTLFPPSSEELQANKATLVCLISDFYPGAVTVAWKADSSPVKAGVETTTPS | |
| | | KQSNNKYAASSYLSLTPEQWKSHRSYSCQVTHEGSTVEKTVAPTECS | |
| iPS:360582 | 17B11.002.006 | QSVLTQPPSVSAAPGQKVTISCSGSSSNIGNNYVSWYQQLPGTAPKLLIYDNNKRPS | 468 |
| | | GIPDRFSGSKSGTSATLAITGLQTGDEADYYCGTWDSSLSAVVFGGGTKLTVLGQP | |
| | | KAAPSVTLFPPSSEELQANKATLVCLISDFYPGAVTVAWKADSSPVKAGVETTTPS | |
| | | KQSNNKYAASSYLSLTPEQWKSHRSYSCQVTHEGSTVEKTVAPTECS | |
| iPS:361518 | 17B11.002.007 | QSVLTQPPSVSAAPGQKVTISCSGSSSNIGNNYVSWYQQLPGTAPKLLIYDNNKRPS | 469 |
| | | GIPDRFSGSKSGTSATLGITGLQTGDEADYYCGTWDSSLSAVVFGGGTKLTVLGQP | |
| | | KAAPSVTLFPPSSEELQANKATLVCLISDFYPGAVTVAWKADSSPVKAGVETTTPS | |
| | | KQSNNKYAASSYLSLTPEQWKSHRSYSCQVTHEGSTVEKTVAPTECS | |
| iPS:360570 | 17B11.002.008 | QSVLTQPPSVSAAPGQKVTISCSGSSSNIGNNYVSWYQQLPGTAPKLLIYDNNKRPS | 470 |
| | | GIPDRFSGSKSGTSATLAITGLQTGDEADYYCGTFESSLSAVVFGGGTKLTVLGQP | |
| | | KAAPSVTLFPPSSEELQANKATLVCLISDFYPGAVTVAWKADSSPVKAGVETTTPS | |
| | | KQSNNKYAASSYLSLTPEQWKSHRSYSCQVTHEGSTVEKTVAPTECS | |
| iPS:362051 | 5G12.005.001 | DIQLTQSPSSLSASVGDRVTITCRASQTISRFLNWYQQKPGKAPKLLIYVASSLQSG | 471 |
| | | VPSRFSGSGSGTDFTLTISSLQPEDFATYYCQQSYSTLLSFGQGTKLEIKRTVAAPSV | |
| | | FIFPPSDEQLKSGTASVVCLLNNFYPREAKVQWKVDNALQSGNSQESVTEQDSKD | |
| | | STYSLSSTLTLSKADYEKHKVYACEVTHQGLSSPVTKSFNRGEC | |

TABLE 15
Heavy Chain (HC) Amino Acid Sequences of Example Anti-GIPR Antibodies

| | | | SEQ |
|---|---|---|---|
| Identifier | Construct | HC | ID NO: |
| iPS:336175 | 2C2.005 | QMQVVQSGAEVKKPGASVKVSCKASGYTFTGYYMHWVRQAPGQGLEWMGWIN | 472 |
| | | PNSGGTNYAQKFQGRVTMTRDTSISTAYMELSRLRSDDTAVYYCARGGDYVWGT | |
| | | YRPHYYYGMDVWGQGTTVTVSSASTKGPSVFPLAPSSKSTSGGTAALGCLVKDYF | |
| | | PEPVTVSWNSGALTSGVHTFPAVLQSSGLYSLSSVVTVPSSSLGTQTYICNVNHKPS | |
| | | NTKVDKKVEPKSCDKTHTCPPCPAPELLGGPSVFLFPPKPKDTLMISRTPEVTCVV | |
| | | VDVSHEDPEVKFNWYVDGVEVHNAKTKPCEEQYGSTYRCVSVLTVLHQDWLNG | |
| | | KEYKCKVSNKALPAPIEKTISKAKGQPREPQVYTLPPSREEMTKNQVSLTCLVKGF | |
| | | YPSDIAVEWESNGQPENNYKTTPPVLDSDGSFFLYSKLTVDKSRWQQGNVFSCSV | |
| | | MHEALHNHYTQKSLSLSPGK | |
| iPS:335914 | 4B1 | QVQLVESGGGVVQPGRSLRLSCAASGFTFSNFGMHWVRQAPGKGLEWVAVIWY | 473 |
| | | DGSNENYADSVKGRFTISRDNSKNTLYLHMNSLRVADTAVYYCARDGTIFGVVLG | |
| | | DYWGQGTLVTVSSASTKGPSVFPLAPSSKSTSGGTAALGCLVKDYFPEPVTVSWN | |
| | | SGALTSGVHTFPAVLQSSGLYSLSSVVTVPSSSLGTQTYICNVNHKPSNTKVDKKV | |
| | | EPKSCDKTHTCPPCPAPELLGGPSVFLFPPKPKDTLMISRTPEVTCVVVDVSHEDPE | |
| | | VKFNWYVDGVEVHNAKTKPCEEQYGSTYRCVSVLTVLHQDWLNGKEYKCKVSN | |
| | | KALPAPIEKTISKAKGQPREPQVYTLPPSREEMTKNQVSLTCLVKGFYPSDIAVEWE | |
| | | SNGQPENNYKTTPPVLDSDGSFFLYSKLTVDKSRWQQGNVFSCSVMHEALHNHY | |
| | | TQKSLSLSPGK | |
| iPS:335938 | 6H1 | QVQLVESGGGVVQPGRSLRLSCAASGFTFSYFGMHWVRQAPGKGLEWVAVIWY | 474 |
| | | DGSNKYYADSVKGRFTISRDNSKNTLYLQMNSLRAEDTAVYYCARDGTIFGVLLG | |
| | | DYWGQGTLVTVSSASTKGPSVFPLAPSSKSTSGGTAALGCLVKDYFPEPVTVSWN | |
| | | SGALTSGVHTFPAVLQSSGLYSLSSVVTVPSSSLGTQTYICNVNHKPSNTKVDKKV | |
| | | EPKSCDKTHTCPPCPAPELLGGPSVFLFPPKPKDTLMISRTPEVTCVVVDVSHEDPE | |
| | | VKFNWYVDGVEVHNAKTKPCEEQYGSTYRCVSVLTVLHQDWLNGKEYKCKVSN | |
| | | KALPAPIEKTISKAKGQPREPQVYTLPPSREEMTKNQVSLTCLVKGFYPSDIAVEWE | |
| | | SNGQPENNYKTTPPVLDSDGSFFLYSKLTVDKSRWQQGNVFSCSVMHEALHNHY | |
| | | TQKSLSLSPGK | |
| iPS:335941 | 2F11 | QVQLVESGGGVVQPGRSLRLSCAASGFTFSSYGMHWVRQAPGKGLEWVAVIWY | 475 |
| | | DGSNKYYADSVKGRFTISSDNSKNTLYLQMNSLRAEDTAVYYCARDRTIFGVVLD | |
| | | YWGQGTLVTVSSASTKGPSVFPLAPSSKSTSGGTAALGCLVKDYFPEPVTVSWNS | |
| | | GALTSGVHTFPAVLQSSGLYSLSSVVTVPSSSLGTQTYICNVNHKPSNTKVDKKVE | |
| | | PKSCDKTHTCPPCPAPELLGGPSVFLFPPKPKDTLMISRTPEVTCVVVDVSHEDPEV | |
| | | KFNWYVDGVEVHNAKTKPCEEQYGSTYRCVSVLTVLHQDWLNGKEYKCKVSNK | |
| | | ALPAPIEKTISKAKGQPREPQVYTLPPSREEMTKNQVSLTCLVKGFYPSDIAVEWES | |
| | | NGQPENNYKTTPPVLDSDGSFFLYSKLTVDKSRWQQGNVFSCSVMHEALHNHYT | |
| | | QKSLSLSPGK | |
| iPS:335970 | 5C2 | QVPLVQSGAEVKKPGASVKVSCKASGYTFTGYYIHWVRQAPGQGLEWMGWINP | 476 |
| | | DSGGTDYSQRFQGRFTMTRDTSISTAYMELNRLRSDDTAVYYCAREATIFGMVIVP | |
| | | FDYWGQGTLVTVSSASTKGPSVFPLAPSSKSTSGGTAALGCLVKDYFPEPVTVSW | |
| | | NSGALTSGVHTFPAVLQSSGLYSLSSVVTVPSSSLGTQTYICNVNHKPSNTKVDKK | |
| | | VEPKSCDKTHTCPPCPAPELLGGPSVFLFPPKPKDTLMISRTPEVTCVVVDVSHEDP | |
| | | EVKFNWYVDGVEVHNAKTKPCEEQYGSTYRCVSVLTVLHQDWLNGKEYKCKVS | |
| | | NKALPAPIEKTISKAKGQPREPQVYTLPPSREEMTKNQVSLTCLVKGFYPSDIAVE | |
| | | WESNGQPENNYKTTPPVLDSDGSFFLYSKLTVDKSRWQQGNVFSCSVMHEALHN | |
| | | HYTQKSLSLSPGK | |
| iPS:335978 | 13H12 | QVPLVQSGAEVKKPGASVKVSCKASGYTFTGYYIHWVRQAPGQGLEWMGWINP | 477 |
| | | DSGGTDYSQRFQGRFTMTRDTSISTAYMELSRLRSDDTAVYYCAREATIFGMVIVP | |
| | | FDYWGQGTLVTVSSASTKGPSVFPLAPSSKSTSGGTAALGCLVKDYFPEPVTVSW | |
| | | NSGALTSGVHTFPAVLQSSGLYSLSSVVTVPSSSLGTQTYICNVNHKPSNTKVDKK | |
| | | VEPKSCDKTHTCPPCPAPELLGGPSVFLFPPKPKDTLMISRTPEVTCVVVDVSHEDP | |
| | | EVKFNWYVDGVEVHNAKTKPCEEQYGSTYRCVSVLTVLHQDWLNGKEYKCKVS | |
| | | NKALPAPIEKTISKAKGQPREPQVYTLPPSREEMTKNQVSLTCLVKGFYPSDIAVE | |
| | | WESNGQPENNYKTTPPVLDSDGSFFLYSKLTVDKSRWQQGNVFSCSVMHEALHN | |
| | | HYTQKSLSLSPGK | |
| iPS:335986 | 11C1 | QVPLVQSGAEVKKPGASVKVSCKASGYTFTGYYIHWVRQAPGQGLVWMGWISP | 478 |
| | | NSGDTSYAQKFQDRVTMTRDTSISTAYMELSRLRSDDTAVYFCTREATIFGMLIVP | |
| | | FDYWGQGTLVTVSSASTKGPSVFPLAPSSKSTSGGTAALGCLVKDYFPEPVTVSW | |
| | | NSGALTSGVHTFPAVLQSSGLYSLSSVVTVPSSSLGTQTYICNVNHKPSNTKVDKK | |
| | | VEPKSCDKTHTCPPCPAPELLGGPSVFLFPPKPKDTLMISRTPEVTCVVVDVSHEDP | |
| | | EVKFNWYVDGVEVHNAKTKPCEEQYGSTYRCVSVLTVLHQDWLNGKEYKCKVS | |
| | | NKALPAPIEKTISKAKGQPREPQVYTLPPSREEMTKNQVSLTCLVKGFYPSDIAVE | |
| | | WESNGQPENNYKTTPPVLDSDGSFFLYSKLTVDKSRWQQGNVFSCSVMHEALHN | |
| | | HYTQKSLSLSPGK | |
| iPS:335994 | 12H11 | QVPLVQSGAEVKKPGASVKVSCKASGYTFTGYYIHWVRQAPGQGLEWMGWISPN | 479 |
| | | NGDTNYAQKFQDRVTMTRDTSISTAYMELSRLRSDDTAVYYCTREATIFGMLIVPF | |
| | | DYWGQGTLVTVSSASTKGPSVFPLAPSSKSTSGGTAALGCLVKDYFPEPVTVSWN | |
| | | SGALTSGVHTFPAVLQSSGLYSLSSVVTVPSSSLGTQTYICNVNHKPSNTKVDKKV | |
| | | EPKSCDKTHTCPPCPAPELLGGPSVFLFPPKPKDTLMISRTPEVTCVVVDVSHEDPE | |
| | | VKFNWYVDGVEVHNAKTKPCEEQYGSTYRCVSVLTVLHQDWLNGKEYKCKVSN | |
| | | KALPAPIEKTISKAKGQPREPQVYTLPPSREEMTKNQVSLTCLVKGFYPSDIAVEWE | |
| | | SNGQPENNYKTTPPVLDSDGSFFLYSKLTVDKSRWQQGNVFSCSVMHEALHNHY | |
| | | TQKSLSLSPGK | |
| iPS:336024 | 18E3 | QVQLQESGPGLVKPSQTLSLTCTVSGDSISSGGYYWSWIRQHPGKGLEWIGYIYYS | 480 |
| | | GSTYYNPSLKSRVTISVDTSKNQFSLKLSSVTAADTAVYYCARDRITIFGVVMGGG | |
| | | MDVWGQGTTVTVSSASTKGPSVFPLAPSSKSTSGGTAALGCLVKDYFPEPVTVSW | |
| | | NSGALTSGVHTFPAVLQSSGLYSLSSVVTVPSSSLGTQTYICNVNHKPSNTKVDKK | |
| | | VEPKSCDKTHTCPPCPAPELLGGPSVFLFPPKPKDTLMISRTPEVTCVVVDVSHEDP | |
| | | EVKFNWYVDGVEVHNAKTKPCEEQYGSTYRCVSVLTVLHQDWLNGKEYKCKVS | |
| | | NKALPAPIEKTISKAKGQPREPQVYTLPPSREEMTKNQVSLTCLVKGFYPSDIAVE | |
| | | WESNGQPENNYKTTPPVLDSDGSFFLYSKLTVDKSRWQQGNVFSCSVMHEALHN | |
| | | HYTQKSLSLSPGK | |
| iPS:336041 | 2G10 LC1 | QVQLVESGGGVVQPGRSLRLSCAASGFTFSNYGMHWVRQAPGEGLEWVAAIWFD | 481 |
| | | GSDKYYADSVKGRFTISRDNSKNTLYLQMNSLRAEDTAVYYCARDQAIFGVVPD | |
| | | YWGQGTLVTVSSASTKGPSVFPLAPSSKSTSGGTAALGCLVKDYFPEPVTVSWNS | |
| | | GALTSGVHTFPAVLQSSGLYSLSSVVTVPSSSLGTQTYICNVNHKPSNTKVDKKVE | |
| | | PKSCDKTHTCPPCPAPELLGGPSVFLFPPKPKDTLMISRTPEVTCVVVDVSHEDPEV | |
| | | KFNWYVDGVEVHNAKTKPCEEQYGSTYRCVSVLTVLHQDWLNGKEYKCKVSNK | |
| | | ALPAPIEKTISKAKGQPREPQVYTLPPSREEMTKNQVSLTCLVKGFYPSDIAVEWES | |
| | | NGQPENNYKTTPPVLDSDGSFFLYSKLTVDKSRWQQGNVFSCSVMHEALHNHYT | |
| | | QKSLSLSPGK | |
| iPS:336077 | 4H9.004 | QVQLVESGGGVVQPGRSLRLSCAASGFTFSYFGMHWVRQAPGKGLEWVAVIWY | 482 |
| | | DGSNKYYADSVKGRFTISRDNSKNTLYLQMNSLRAEDTAVYYCARDGTIFGVLLG | |
| | | DYWGQGTLVTVSSASTKGPSVFPLAPSSKSTSGGTAALGCLVKDYFPEPVTVSWN | |
| | | SGALTSGVHTFPAVLQSSGLYSLSSVVTVPSSSLGTQTYICNVNHKPSNTKVDKKV | |
| | | EPKSCDKTHTCPPCPAPELLGGPSVFLFPPKPKDTLMISRTPEVTCVVVDVSHEDPE | |
| | | VKFNWYVDGVEVHNAKTKPCEEQYGSTYRCVSVLTVLHQDWLNGKEYKCKVSN | |
| | | KALPAPIEKTISKAKGQPREPQVYTLPPSREEMTKNQVSLTCLVKGFYPSDIAVEWE | |
| | | SNGQPENNYKTTPPVLDSDGSFFLYSKLTVDKSRWQQGNVFSCSVMHEALHNHY | |
| | | TQKSLSLSPGK | |
| iPS:336088 | 6A5.004 | QVQLVESGGGVVQPGRSLRLSCAASGFSFSSYGMHWVRQPPGKGLEWVAAIWYD | 483 |
| | | GNNKYYADSVKGRFTISRDSSKNTLYLQMNSLRAEDTAVYYCARDRTIFGVVLEY | |
| | | LGQGTLVTVSSASTKGPSVFPLAPSSKSTSGGTAALGCLVKDYFPEPVTVSWNSGA | |
| | | LTSGVHTFPAVLQSSGLYSLSSVVTVPSSSLGTQTYICNVNHKPSNTKVDKKVEPK | |
| | | SCDKTHTCPPCPAPELLGGPSVFLFPPKPKDTLMISRTPEVTCVVVDVSHEDPEVKF | |
| | | NWYVDGVEVHNAKTKPCEEQYGSTYRCVSVLTVLHQDWLNGKEYKCKVSNKAL | |
| | | PAPIEKTISKAKGQPREPQVYTLPPSREEMTKNQVSLTCLVKGFYPSDIAVEWESNG | |
| | | QPENNYKTTPPVLDSDGSFFLYSKLTVDKSRWQQGNVFSCSVMHEALHNHYTQK | |
| | | SLSLSPGK | |
| iPS:336099 | 17H11.004 | QVQLQESGPGLVKPSETLSLTCTVSQGSISSYYWSWIRQPAGKGLEWIGRIYTSGST | 484 |
| | | NYNPSLKSRVTMSIDTSKNQFSLKLNSVTAADTAVYYCARDVAVAGFDYWGQGT | |
| | | LVTVSSASTKGPSVFPLAPSSKSTSGGTAALGCLVKDYFPEPVTVSWNSGALTSGV | |
| | | HTFPAVLQSSGLYSLSSVVTVPSSSLGTQTYICNVNHKPSNTKVDKKVEPKSCDKT | |
| | | HTCPPCPAPELLGGPSVFLFPPKPKDTLMISRTPEVTCVVVDVSHEDPEVKFNWYV | |
| | | DGVEVHNAKTKPCEEQYGSTYRCVSVLTVLHQDWLNGKEYKCKVSNKALPAPIE | |
| | | KTISKAKGQPREPQVYTLPPSREEMTKNQVSLTCLVKGFYPSDIAVEWESNGQPEN | |
| | | NYKTTPPVLDSDGSFFLYSKLTVDKSRWQQGNVFSCSVMHEALHNHYTQKSLSLS | |
| | | PGK | |
| iPS:359621 | 17H11.004.001 | QVQLQESGPGLVKPSETLSLTCTVSGGSISSYYWSWIRQPAGKGLEWIGRIYTSGST | 485 |
| | | NYNPSLKSRVTMSIDTSKNQFSLKLNSVTAADTAVYYCARDVAVAGFDYWGQGT | |
| | | LVTVSSASTKGPSVFPLAPSSKSTSGGTAALGCLVKDYFPEPVTVSWNSGALTSGV | |
| | | HTFPAVLQSSGLYSLSSVVTVPSSSLGTQTYICNVNHKPSNTKVDKKVEPKSCDKT | |
| | | HTCPPCPAPELLGGPSVFLFPPKPKDTLMISRTPEVTCVVVDVSHEDPEVKFNWYV | |
| | | DGVEVHNAKTKPCEEQYGSTYRCVSVLTVLHQDWLNGKEYKCKVSNKALPAPIE | |
| | | KTISKAKGQPREPQVYTLPPSREEMTKNQVSLTCLVKGFYPSDIAVEWESNGQPEN | |
| | | NYKTTPPVLDSDGSFFLYSKLTVDKSRWQQGNVFSCSVMHEALHNHYTQKSLSLS | |
| | | PGK | |
| iPS:359781 | 4H9.004.001 | QVQLVESGGGVVQPGRSLRLSCAASGFTFSYFGMHWVRQAPGKGLEWVAVIWY | 486 |
| | | DASNKYYADAVKGRFTISRDNSKNTLYLQMNSLRAEDTAVYYCARDGTIFGVLL | |
| | | GDYWGQGTLVTVSSASTKGPSVFPLAPSSKSTSGGTAALGCLVKDYFPEPVTVSW | |
| | | NSGALTSGVHTFPAVLQSSGLYSLSSVVTVPSSSLGTQTYICNVNHKPSNTKVDKK | |
| | | VEPKSCDKTHTCPPCPAPELLGGPSVFLFPPKPKDTLMISRTPEVTCVVVDVSHEDP | |
| | | EVKFNWYVDGVEVHNAKTKPCEEQYGSTYRCVSVLTVLHQDWLNGKEYKCKVS | |
| | | NKALPAPIEKTISKAKGQPREPQVYTLPPSREEMTKNQVSLTCLVKGFYPSDIAVE | |
| | | WESNGQPENNYKTTPPVLDSDGSFFLYSKLTVDKSRWQQGNVFSCSVMHEALHN | |
| | | HYTQKSLSLSPGK | |
| iPS:360929 | 4H9.004.002 | QVQLVESGGGVVQPGRSLRLSCAASGFTFSYFGMHWVRQAPGKGLEWVAVIWY | 487 |
| | | DASNKYYADSVKGRFTISRDNSKNTLYLQMNSLRAEDTAVYYCARDGTIFGVLLG | |
| | | DYWGQGTLVTVSSASTKGPSVFPLAPSSKSTSGGTAALGCLVKDYFPEPVTVSWN | |
| | | SGALTSGVHTFPAVLQSSGLYSLSSVVTVPSSSLGTQTYICNVNHKPSNTKVDKKV | |
| | | EPKSCDKTHTCPPCPAPELLGGPSVFLFPPKPKDTLMISRTPEVTCVVVDVSHEDPE | |
| | | VKFNWYVDGVEVHNAKTKPCEEQYGSTYRCVSVLTVLHQDWLNGKEYKCKVSN | |
| | | KALPAPIEKTISKAKGQPREPQVYTLPPSREEMTKNQVSLTCLVKGFYPSDIAVEWE | |
| | | SNGQPENNYKTTPPVLDSDGSFFLYSKLTVDKSRWQQGNVFSCSVMHEALHNHY | |
| | | TQKSLSLSPGK | |
| iPS:360936 | 4H9.004.003 | QVQLVESGGGVVQPGRSLRLSCAASGFTFSYFGMHWVRQAPGKGLEWVAVIWY | 488 |
| | | DGSNKYYADAVKGRFTISRDNSKNTLYLQMNSLRAEDTAVYYCARDGTIFGVLL | |
| | | GDYWGQGTLVTVSSASTKGPSVFPLAPSSKSTSGGTAALGCLVKDYFPEPVTVSW | |
| | | NSGALTSGVHTFPAVLQSSGLYSLSSVVTVPSSSLGTQTYICNVNHKPSNTKVDKK | |
| | | VEPKSCDKTHTCPPCPAPELLGGPSVFLFPPKPKDTLMISRTPEVTCVVVDVSHEDP | |
| | | EVKFNWYVDGVEVHNAKTKPCEEQYGSTYRCVSVLTVLHQDWLNGKEYKCKVS | |
| | | NKALPAPIEKTISKAKGQPREPQVYTLPPSREEMTKNQVSLTCLVKGFYPSDIAVE | |
| | | WESNGQPENNYKTTPPVLDSDGSFFLYSKLTVDKSRWQQGNVFSCSVMHEALHN | |
| | | HYTQKSLSLSPGK | |
| iPS:360943 | 4H9.004.004 | QVQLVESGGGVVQPGRSLRLSCAASGFTFSYFGMHWVRQAPGKGLEWVAVIWY | 489 |
| | | DASNKYYADAVKGRFTISRDNSKNTLYLQMNSLRAEDTAVYYCARDGTIFGVLL | |
| | | GDYWGQGTLVTVSSASTKGPSVFPLAPSSKSTSGGTAALGCLVKDYFPEPVTVSW | |
| | | NSGALTSGVHTFPAVLQSSGLYSLSSVVTVPSSSLGTQTYICNVNHKPSNTKVDKK | |
| | | VEPKSCDKTHTCPPCPAPELLGGPSVFLFPPKPKDTLMISRTPEVTCVVVDVSHEDP | |
| | | EVKFNWYVDGVEVHNAKTKPCEEQYGSTYRCVSVLTVLHQDWLNGKEYKCKVS | |
| | | NKALPAPIEKTISKAKGQPREPQVYTLPPSREEMTKNQVSLTCLVKGFYPSDIAVE | |
| | | WESNGQPENNYKTTPPVLDSDGSFFLYSKLTVDKSRWQQGNVFSCSVMHEALHN | |
| | | HYTQKSLSLSPGK | |
| iPS:360949 | 4H9.004.005 | QVQLVESGGGVVQPGRSLRLSCAASGFTFSYFGMHWVRQAPGKGLEWVAVIWY | 490 |
| | | DASNKYYADAVKGRFTISRDNSKNTLYLQMNSLRAEDTAVYYCARDGTIFGVLL | |
| | | GDYWGQGTLVTVSSASTKGPSVFPLAPSSKSTSGGTAALGCLVKDYFPEPVTVSW | |
| | | NSGALTSGVHTFPAVLQSSGLYSLSSVVTVPSSSLGTQTYICNVNHKPSNTKVDKK | |
| | | VEPKSCDKTHTCPPCPAPELLGGPSVFLFPPKPKDTLMISRTPEVTCVVVDVSHEDP | |
| | | EVKFNWYVDGVEVHNAKTKPCEEQYGSTYRCVSVLTVLHQDWLNGKEYKCKVS | |
| | | NKALPAPIEKTISKAKGQPREPQVYTLPPSREEMTKNQVSLTCLVKGFYPSDIAVE | |
| | | WESNGQPENNYKTTPPVLDSDGSFFLYSKLTVDKSRWQQGNVFSCSVMHEALHN | |
| | | HYTQKSLSLSPGK | |
| iPS:359761 | 4H9.004.006 | QVQLVESGGGVVQPGRSLRLSCAASGFTFSYFGMHWVRQAPGKGLEWVAVIWY | 491 |
| | | DASNKYYADAVKGRFTISRDNSKNTLYLQMNSLRAEDTAVYYCARDRTIFGVLLG | |
| | | DYWGQGTLVTVSSASTKGPSVFPLAPSSKSTSGGTAALGCLVKDYFPEPVTVSWN | |
| | | SGALTSGVHTFPAVLQSSGLYSLSSVVTVPSSSLGTQTYICNVNHKPSNTKVDKKV | |
| | | EPKSCDKTHTCPPCPAPELLGGPSVFLFPPKPKDTLMISRTPEVTCVVVDVSHEDPE | |
| | | VKFNWYVDGVEVHNAKTKPCEEQYGSTYRCVSVLTVLHQDWLNGKEYKCKVSN | |
| | | KALPAPIEKTISKAKGQPREPQVYTLPPSREEMTKNQVSLTCLVKGFYPSDIAVEWE | |
| | | SNGQPENNYKTTPPVLDSDGSFFLYSKLTVDKSRWQQGNVFSCSVMHEALHNHY | |
| | | TQKSLSLSPGK | |
| iPS:360955 | 4B1.010 | QVQLVESGGGVVQPGRSLRLSCAASGFTFSNFGMHWVRQAPGKGLEWVAVIWY | 492 |
| | | DASNENYADAVKGRFTISRDNSKNTLYLQMNSLRVADTAVYYCARDGTIFGVVL | |
| | | GDYWGQGTLVTVSSASTKGPSVFPLAPSSKSTSGGTAALGCLVKDYFPEPVTVSW | |
| | | NSGALTSGVHTFPAVLQSSGLYSLSSVVTVPSSSLGTQTYICNVNHKPSNTKVDKK | |
| | | VEPKSCDKTHTCPPCPAPELLGGPSVFLFPPKPKDTLMISRTPEVTCVVVDVSHEDP | |
| | | EVKFNWYVDGVEVHNAKTKPCEEQYGSTYRCVSVLTVLHQDWLNGKEYKCKVS | |
| | | NKALPAPIEKTISKAKGQPREPQVYTLPPSREEMTKNQVSLTCLVKGFYPSDIAVE | |
| | | WESNGQPENNYKTTPPVLDSDGSFFLYSKLTVDKSRWQQGNVFSCSVMHEALHN | |
| | | HYTQKSLSLSPGK | |
| iPS:360962 | 4B1.011 | QVQLVESGGGVVQPGRSLRLSCAASGFTFSNFGMHWVRQAPGKGLEWVAVIWY | 493 |
| | | DASNENYADAVKGRFTISRDNSKNTLYLQMNSLRVADTAVYYCARDGTIFGVVL | |
| | | GDYWGQGTLVTVSSASTKGPSVFPLAPSSKSTSGGTAALGCLVKDYFPEPVTVSW | |
| | | NSGALTSGVHTFPAVLQSSGLYSLSSVVTVPSSSLGTQTYICNVNHKPSNTKVDKK | |
| | | VEPKSCDKTHTCPPCPAPELLGGPSVFLFPPKPKDTLMISRTPEVTCVVVDVSHEDP | |
| | | EVKFNWYVDGVEVHNAKTKPCEEQYGSTYRCVSVLTVLHQDWLNGKEYKCKVS | |
| | | NKALPAPIEKTISKAKGQPREPQVYTLPPSREEMTKNQVSLTCLVKGFYPSDIAVE | |
| | | WESNGQPENNYKTTPPVLDSDGSFFLYSKLTVDKSRWQQGNVFSCSVMHEALHN | |
| | | HYTQKSLSLSPGK | |
| iPS:360968 | 4B1.012 | QVQLVESGGGVVQPGRSLRLSCAASGFTFSNFGMHWVRQAPGKGLEWVAVIWY | 494 |
| | | DASNENYADAVKGRFTISRDNSKNTLYLQMNSLRVADTAVYYCARDGTIFGVVL | |
| | | GDYWGQGTLVTVSSASTKGPSVFPLAPSSKSTSGGTAALGCLVKDYFPEPVTVSW | |
| | | NSGALTSGVHTFPAVLQSSGLYSLSSVVTVPSSSLGTQTYICNVNHKPSNTKVDKK | |
| | | VEPKSCDKTHTCPPCPAPELLGGPSVFLFPPKPKDTLMISRTPEVTCVVVDVSHEDP | |
| | | EVKFNWYVDGVEVHNAKTKPCEEQYGSTYRCVSVLTVLHQDWLNGKEYKCKVS | |
| | | NKALPAPIEKTISKAKGQPREPQVYTLPPSREEMTKNQVSLTCLVKGFYPSDIAVE | |
| | | WESNGQPENNYKTTPPVLDSDGSFFLYSKLTVDKSRWQQGNVFSCSVMHEALHN | |
| | | HYTQKSLSLSPGK | |
| iPS:360974 | 4B1.013 | QVQLVESGGGVVQPGRSLRLSCAASGFTFSNFGMHWVRQAPGKGLEWVAVIWY | 495 |
| | | DASNENYADSVKGRFTISRDNSKNTLYLHMNSLRVADTAVYYCARDGTIFGVVLG | |
| | | DYWGQGTLVTVSSASTKGPSVFPLAPSSKSTSGGTAALGCLVKDYFPEPVTVSWN | |
| | | SGALTSGVHTFPAVLQSSGLYSLSSVVTVPSSSLGTQTYICNVNHKPSNTKVDKKV | |
| | | EPKSCDKTHTCPPCPAPELLGGPSVFLFPPKPKDTLMISRTPEVTCVVVDVSHEDPE | |
| | | VKFNWYVDGVEVHNAKTKPCEEQYGSTYRCVSVLTVLHQDWLNGKEYKCKVSN | |
| | | KALPAPIEKTISKAKGQPREPQVYTLPPSREEMTKNQVSLTCLVKGFYPSDIAVEWE | |
| | | SNGQPENNYKTTPPVLDSDGSFFLYSKLTVDKSRWQQGNVFSCSVMHEALHNHY | |
| | | TQKSLSLSPGK | |
| iPS:360978 | 4B1.014 | QVQLVESGGGVVQPGRSLRLSCAASGFTFSNFGMHWVRQAPGKGLEWVAVIWY | 496 |
| | | DGSNENYADAVKGRFTISRDNSKNTLYLHMNSLRVADTAVYYCARDGTIFGVVL | |
| | | GDYWGQGTLVTVSSASTKGPSVFPLAPSSKSTSGGTAALGCLVKDYFPEPVTVSW | |
| | | NSGALTSGVHTFPAVLQSSGLYSLSSVVTVPSSSLGTQTYICNVNHKPSNTKVDKK | |
| | | VEPKSCDKTHTCPPCPAPELLGGPSVFLFPPKPKDTLMISRTPEVTCVVVDVSHEDP | |
| | | EVKFNWYVDGVEVHNAKTKPCEEQYGSTYRCVSVLTVLHQDWLNGKEYKCKVS | |
| | | NKALPAPIEKTISKAKGQPREPQVYTLPPSREEMTKNQVSLTCLVKGFYPSDIAVE | |
| | | WESNGQPENNYKTTPPVLDSDGSFFLYSKLTVDKSRWQQGNVFSCSVMHEALHN | |
| | | HYTQKSLSLSPGK | |
| iPS:359785 | 4B1.015 | QVQLVESGGGVVQPGRSLRLSCAASGFTFSNFGMHWVRQAPGKGLEWVAVIWY | 497 |
| | | DASNENYADAVKGRFTISRDNSKNTLYLQMNSLRVEDTAVYYCARDRTIFGVVLG | |
| | | DYWGQGTLVTVSSASTKGPSVFPLAPSSKSTSGGTAALGCLVKDYFPEPVTVSWN | |
| | | SGALTSGVHTFPAVLQSSGLYSLSSVVTVPSSSLGTQTYICNVNHKPSNTKVDKKV | |
| | | EPKSCDKTHTCPPCPAPELLGGPSVFLFPPKPKDTLMISRTPEVTCVVVDVSHEDPE | |
| | | VKFNWYVDGVEVHNAKTKPCEEQYGSTYRCVSVLTVLHQDWLNGKEYKCKVSN | |
| | | KALPAPIEKTISKAKGQPREPQVYTLPPSREEMTKNQVSLTCLVKGFYPSDIAVEWE | |
| | | SNGQPENNYKTTPPVLDSDGSFFLYSKLTVDKSRWQQGNVFSCSVMHEALHNHY | |
| | | TQKSLSLSPGK | |
| iPS:360982 | 4B1.016 | QVQLVESGGGVVQPGRSLRLSCAASGFTFSNFGMHWVRQAPGKGLEWVAVIWY | 498 |
| | | DASNENYADAVKGRFTISRDNSKNTLYLQMNSLRVEDTAVYYCARDGTIFGVVL | |
| | | GDYWGQGTLVTVSSASTKGPSVFPLAPSSKSTSGGTAALGCLVKDYFPEPVTVSW | |
| | | NSGALTSGVHTFPAVLQSSGLYSLSSVVTVPSSSLGTQTYICNVNHKPSNTKVDKK | |
| | | VEPKSCDKTHTCPPCPAPELLGGPSVFLFPPKPKDTLMISRTPEVTCVVVDVSHEDP | |
| | | EVKFNWYVDGVEVHNAKTKPCEEQYGSTYRCVSVLTVLHQDWLNGKEYKCKVS | |
| | | NKALPAPIEKTISKAKGQPREPQVYTLPPSREEMTKNQVSLTCLVKGFYPSDIAVE | |
| | | WESNGQPENNYKTTPPVLDSDGSFFLYSKLTVDKSRWQQGNVFSCSVMHEALHN | |
| | | HYTQKSLSLSPGK | |
| iPS:335922 | 18F2 | QVQLVESGGGVVQPGRSLRLSCAASGFTFSNFGMHWVRQAPGKGLEWVAVIWY | 499 |
| | | DGSNENYADSVKGRFTISRDNSKNTLYLHMNSLRAADTAVYYCARDGTIFGVVLG | |
| | | DYWGQGTLVTVSSASTKGPSVFPLAPSSKSTSGGTAALGCLVKDYFPEPVTVSWN | |
| | | SGALTSGVHTFPAVLQSSGLYSLSSVVTVPSSSLGTQTYICNVNHKPSNTKVDKKV | |
| | | EPKSCDKTHTCPPCPAPELLGGPSVFLFPPKPKDTLMISRTPEVTCVVVDVSHEDPE | |
| | | VKFNWYVDGVEVHNAKTKPCEEQYGSTYRCVSVLTVLHQDWLNGKEYKCKVSN | |
| | | KALPAPIEKTISKAKGQPREPQVYTLPPSREEMTKNQVSLTCLVKGFYPSDIAVEWE | |
| | | SNGQPENNYKTTPPVLDSDGSFFLYSKLTVDKSRWQQGNVFSCSVMHEALHNHY | |
| | | TQKSLSLSPGK | |
| iPS:360986 | 18F2.002 | QVQLVESGGGVVQPGRSLRLSCAASGFTFSNFGMHWVRQAPGKGLEWVAVIWY | 500 |
| | | DASNENYADAVKGRFTISRDNSKNTLYLQMNSLRAADTAVYYCARDGTIFGVVL | |
| | | GDYWGQGTLVTVSSASTKGPSVFPLAPSSKSTSGGTAALGCLVKDYFPEPVTVSW | |
| | | NSGALTSGVHTFPAVLQSSGLYSLSSVVTVPSSSLGTQTYICNVNHKPSNTKVDKK | |
| | | VEPKSCDKTHTCPPCPAPELLGGPSVFLFPPKPKDTLMISRTPEVTCVVVDVSHEDP | |
| | | EVKFNWYVDGVEVHNAKTKPCEEQYGSTYRCVSVLTVLHQDWLNGKEYKCKVS | |
| | | NKALPAPIEKTISKAKGQPREPQVYTLPPSREEMTKNQVSLTCLVKGFYPSDIAVE | |
| | | WESNGQPENNYKTTPPVLDSDGSFFLYSKLTVDKSRWQQGNVFSCSVMHEALHN | |
| | | HYTQKSLSLSPGK | |
| iPS:360995 | 18F2.003 | QVQLVESGGGVVQPGRSLRLSCAASGFTFSNFGMHWVRQAPGKGLEWVAVIWY | 501 |
| | | DASNENYADAVKGRFTISRDNSKNTLYLHMNSLRAADTAVYYCARDGTIFGVVL | |
| | | GDYWGQGTLVTVSSASTKGPSVFPLAPSSKSTSGGTAALGCLVKDYFPEPVTVSW | |
| | | NSGALTSGVHTFPAVLQSSGLYSLSSVVTVPSSSLGTQTYICNVNHKPSNTKVDKK | |
| | | VEPKSCDKTHTCPPCPAPELLGGPSVFLFPPKPKDTLMISRTPEVTCVVVDVSHEDP | |
| | | EVKFNWYVDGVEVHNAKTKPCEEQYGSTYRCVSVLTVLHQDWLNGKEYKCKVS | |
| | | NKALPAPIEKTISKAKGQPREPQVYTLPPSREEMTKNQVSLTCLVKGFYPSDIAVE | |
| | | WESNGQPENNYKTTPPVLDSDGSFFLYSKLTVDKSRWQQGNVFSCSVMHEALHN | |
| | | HYTQKSLSLSPGK | |
| iPS:360999 | 18F2.004 | QVQLVESGGGVVQPGRSLRLSCAASGFTFSNFGMHWVRQAPGKGLEWVAVIWY | 502 |
| | | DASNENYADAVKGRFTISRDNSKNTLYLQMNSLRAADTAVYYCARDGTIFGVVL | |
| | | GDYWGQGTLVTVSSASTKGPSVFPLAPSSKSTSGGTAALGCLVKDYFPEPVTVSW | |
| | | NSGALTSGVHTFPAVLQSSGLYSLSSVVTVPSSSLGTQTYICNVNHKPSNTKVDKK | |
| | | VEPKSCDKTHTCPPCPAPELLGGPSVFLFPPKPKDTLMISRTPEVTCVVVDVSHEDP | |
| | | EVKFNWYVDGVEVHNAKTKPCEEQYGSTYRCVSVLTVLHQDWLNGKEYKCKVS | |
| | | NKALPAPIEKTISKAKGQPREPQVYTLPPSREEMTKNQVSLTCLVKGFYPSDIAVE | |
| | | WESNGQPENNYKTTPPVLDSDGSFFLYSKLTVDKSRWQQGNVFSCSVMHEALHN | |
| | | HYTQKSLSLSPGK | |
| iPS:361005 | 18F2.005 | QVQLVESGGGVVQPGRSLRLSCAASGFTFSNFGMHWVRQAPGKGLEWVAVIWY | 503 |
| | | DASNENYADAVKGRFTISRDNSKNTLYLQMNSLRAADTAVYYCARDGTIFGVVL | |
| | | GDYWGQGTLVTVSSASTKGPSVFPLAPSSKSTSGGTAALGCLVKDYFPEPVTVSW | |
| | | NSGALTSGVHTFPAVLQSSGLYSLSSVVTVPSSSLGTQTYICNVNHKPSNTKVDKK | |
| | | VEPKSCDKTHTCPPCPAPELLGGPSVFLFPPKPKDTLMISRTPEVTCVVVDVSHEDP | |
| | | EVKFNWYVDGVEVHNAKTKPCEEQYGSTYRCVSVLTVLHQDWLNGKEYKCKVS | |
| | | NKALPAPIEKTISKAKGQPREPQVYTLPPSREEMTKNQVSLTCLVKGFYPSDIAVE | |
| | | WESNGQPENNYKTTPPVLDSDGSFFLYSKLTVDKSRWQQGNVFSCSVMHEALHN | |
| | | HYTQKSLSLSPGK | |
| iPS:361009 | 18F2.006 | QVQLVESGGGVVQPGRSLRLSCAASGFTFSNFGMHWVRQAPGKGLEWVAVIWY | 504 |
| | | DASNENYADAVKGRFTISRDNSKNTLYLHMNSLRAADTAVYYCARDGTIFGVVL | |
| | | GDYWGQGTLVTVSSASTKGPSVFPLAPSSKSTSGGTAALGCLVKDYFPEPVTVSW | |
| | | NSGALTSGVHTFPAVLQSSGLYSLSSVVTVPSSSLGTQTYICNVNHKPSNTKVDKK | |
| | | VEPKSCDKTHTCPPCPAPELLGGPSVFLFPPKPKDTLMISRTPEVTCVVVDVSHEDP | |
| | | EVKFNWYVDGVEVHNAKTKPCEEQYGSTYRCVSVLTVLHQDWLNGKEYKCKVS | |
| | | NKALPAPIEKTISKAKGQPREPQVYTLPPSREEMTKNQVSLTCLVKGFYPSDIAVE | |
| | | WESNGQPENNYKTTPPVLDSDGSFFLYSKLTVDKSRWQQGNVFSCSVMHEALHN | |
| | | HYTQKSLSLSPGK | |
| iPS:361013 | 18F2.007 | QVQLVESGGGVVQPGRSLRLSCAASGFTFSNFGMHWVRQAPGKGLEWVAVIWY | 505 |
| | | DASNENYADAVKGRFTISRDNSKNTLYLHMNSLRAADTAVYYCARDGTIFGVVL | |
| | | GDYWGQGTLVTVSSASTKGPSVFPLAPSSKSTSGGTAALGCLVKDYFPEPVTVSW | |
| | | NSGALTSGVHTFPAVLQSSGLYSLSSVVTVPSSSLGTQTYICNVNHKPSNTKVDKK | |
| | | VEPKSCDKTHTCPPCPAPELLGGPSVFLFPPKPKDTLMISRTPEVTCVVVDVSHEDP | |
| | | EVKFNWYVDGVEVHNAKTKPCEEQYGSTYRCVSVLTVLHQDWLNGKEYKCKVS | |
| | | NKALPAPIEKTISKAKGQPREPQVYTLPPSREEMTKNQVSLTCLVKGFYPSDIAVE | |
| | | WESNGQPENNYKTTPPVLDSDGSFFLYSKLTVDKSRWQQGNVFSCSVMHEALHN | |
| | | HYTQKSLSLSPGK | |
| iPS:361017 | 18F2.008 | QVQLVESGGGVVQPGRSLRLSCAASGFTFSNFGMHWVRQAPGKGLEWVAVIWY | 506 |
| | | DASNENYADAVKGRFTISRDNSKNTLYLQMNSLRAADTAVYYCARDGTIFGVVL | |
| | | GDYWGQGTLVTVSSASTKGPSVFPLAPSSKSTSGGTAALGCLVKDYFPEPVTVSW | |
| | | NSGALTSGVHTFPAVLQSSGLYSLSSVVTVPSSSLGTQTYICNVNHKPSNTKVDKK | |
| | | VEPKSCDKTHTCPPCPAPELLGGPSVFLFPPKPKDTLMISRTPEVTCVVVDVSHEDP | |
| | | EVKFNWYVDGVEVHNAKTKPCEEQYGSTYRCVSVLTVLHQDWLNGKEYKCKVS | |
| | | NKALPAPIEKTISKAKGQPREPQVYTLPPSREEMTKNQVSLTCLVKGFYPSDIAVE | |
| | | WESNGQPENNYKTTPPVLDSDGSFFLYSKLTVDKSRWQQGNVFSCSVMHEALHN | |
| | | HYTQKSLSLSPGK | |
| iPS:361021 | 18F2.009 | QVQLVESGGGVVQPGRSLRLSCAASGFTFSNFGMHWVRQAPGKGLEWVAVIWY | 507 |
| | | DGSNENYADAVKGRFTISRDNSKNTLYLQMNSLRAADTAVYYCARDGTIFGVVL | |
| | | GDYWGQGTLVTVSSASTKGPSVFPLAPSSKSTSGGTAALGCLVKDYFPEPVTVSW | |
| | | NSGALTSGVHTFPAVLQSSGLYSLSSVVTVPSSSLGTQTYICNVNHKPSNTKVDKK | |
| | | VEPKSCDKTHTCPPCPAPELLGGPSVFLFPPKPKDTLMISRTPEVTCVVVDVSHEDP | |
| | | EVKFNWYVDGVEVHNAKTKPCEEQYGSTYRCVSVLTVLHQDWLNGKEYKCKVS | |
| | | NKALPAPIEKTISKAKGQPREPQVYTLPPSREEMTKNQVSLTCLVKGFYPSDIAVE | |
| | | WESNGQPENNYKTTPPVLDSDGSFFLYSKLTVDKSRWQQGNVFSCSVMHEALHN | |
| | | HYTQKSLSLSPGK | |
| iPS:361028 | 18F2.010 | QVQLVESGGGVVQPGRSLRLSCAASGFTFSNFGMHWVRQAPGKGLEWVAVIWY | 508 |
| | | DASNENYADSVKGRFTISRDNSKNTLYLQMNSLRAADTAVYYCARDGTIFGVVLG | |
| | | DYWGQGTLVTVSSASTKGPSVFPLAPSSKSTSGGTAALGCLVKDYFPEPVTVSWN | |
| | | SGALTSGVHTFPAVLQSSGLYSLSSVVTVPSSSLGTQTYICNVNHKPSNTKVDKKV | |
| | | EPKSCDKTHTCPPCPAPELLGGPSVFLFPPKPKDTLMISRTPEVTCVVVDVSHEDPE | |
| | | VKFNWYVDGVEVHNAKTKPCEEQYGSTYRCVSVLTVLHQDWLNGKEYKCKVSN | |
| | | KALPAPIEKTISKAKGQPREPQVYTLPPSREEMTKNQVSLTCLVKGFYPSDIAVEWE | |
| | | SNGQPENNYKTTPPVLDSDGSFFLYSKLTVDKSRWQQGNVFSCSVMHEALHNHY | |
| | | TQKSLSLSPGK | |
| iPS:360535 | 18F2.011 | QVQLVESGGGVVQPGRSLRLSCAASGFTFSNFGMHWVRQAPGKGLEWVAVIWY | 509 |
| | | DASNENYADAVKGRFTISRDNSKNTLYLQMNSLRAEDTAVYYCARDRTIFGVVLG | |
| | | DYWGQGTLVTVSSASTKGPSVFPLAPSSKSTSGGTAALGCLVKDYFPEPVTVSWN | |
| | | SGALTSGVHTFPAVLQSSGLYSLSSVVTVPSSSLGTQTYICNVNHKPSNTKVDKKV | |
| | | EPKSCDKTHTCPPCPAPELLGGPSVFLFPPKPKDTLMISRTPEVTCVVVDVSHEDPE | |
| | | VKFNWYVDGVEVHNAKTKPCEEQYGSTYRCVSVLTVLHQDWLNGKEYKCKVSN | |
| | | KALPAPIEKTISKAKGQPREPQVYTLPPSREEMTKNQVSLTCLVKGFYPSDIAVEWE | |
| | | SNGQPENNYKTTPPVLDSDGSFFLYSKLTVDKSRWQQGNVFSCSVMHEALHNHY | |
| | | TQKSLSLSPGK | |
| iPS:361035 | 18F2.012 | QVQLVESGGGVVQPGRSLRLSCAASGFTFSNFGMHWVRQAPGKGLEWVAVIWY | 510 |
| | | DASNENYADAVKGRFTISRDNSKNTLYLQMNSLRAEDTAVYYCARDGTIFGVVL | |
| | | GDYWGQGTLVTVSSASTKGPSVFPLAPSSKSTSGGTAALGCLVKDYFPEPVTVSW | |
| | | NSGALTSGVHTFPAVLQSSGLYSLSSVVTVPSSSLGTQTYICNVNHKPSNTKVDKK | |
| | | VEPKSCDKTHTCPPCPAPELLGGPSVFLFPPKPKDTLMISRTPEVTCVVVDVSHEDP | |
| | | EVKFNWYVDGVEVHNAKTKPCEEQYGSTYRCVSVLTVLHQDWLNGKEYKCKVS | |
| | | NKALPAPIEKTISKAKGQPREPQVYTLPPSREEMTKNQVSLTCLVKGFYPSDIAVE | |
| | | WESNGQPENNYKTTPPVLDSDGSFFLYSKLTVDKSRWQQGNVFSCSVMHEALHN | |
| | | HYTQKSLSLSPGK | |
| iPS:359940 | 2F11.002 | QVQLVESGGGVVQPGRSLRLSCAASGFTFSSYGMHWVRQAPGKGLEWVAVIWY | 511 |
| | | DASNKYYADAVKGRFTISRDNSKNTLYLQMNSLRAEDTAVYYCARDRTIFGVVL | |
| | | DYWGQGTLVTVSSASTKGPSVFPLAPSSKSTSGGTAALGCLVKDYFPEPVTVSWN | |
| | | SGALTSGVHTFPAVLQSSGLYSLSSVVTVPSSSLGTQTYICNVNHKPSNTKVDKKV | |
| | | EPKSCDKTHTCPPCPAPELLGGPSVFLFPPKPKDTLMISRTPEVTCVVVDVSHEDPE | |
| | | VKFNWYVDGVEVHNAKTKPCEEQYGSTYRCVSVLTVLHQDWLNGKEYKCKVSN | |
| | | KALPAPIEKTISKAKGQPREPQVYTLPPSREEMTKNQVSLTCLVKGFYPSDIAVEWE | |
| | | SNGQPENNYKTTPPVLDSDGSFFLYSKLTVDKSRWQQGNVFSCSVMHEALHNHY | |
| | | TQKSLSLSPGK | |
| iPS:361039 | 2F11.003 | QVQLVESGGGVVQPGRSLRLSCAASGFTFSSYGMHWVRQAPGKGLEWVAVIWY | 512 |
| | | DASNKYYADAVKGRFTISSDNSKNTLYLQMNSLRAEDTAVYYCARDRTIFGVVLD | |
| | | YWGQGTLVTVSSASTKGPSVFPLAPSSKSTSGGTAALGCLVKDYFPEPVTVSWNS | |
| | | GALTSGVHTFPAVLQSSGLYSLSSVVTVPSSSLGTQTYICNVNHKPSNTKVDKKVE | |
| | | PKSCDKTHTCPPCPAPELLGGPSVFLFPPKPKDTLMISRTPEVTCVVVDVSHEDPEV | |
| | | KFNWYVDGVEVHNAKTKPCEEQYGSTYRCVSVLTVLHQDWLNGKEYKCKVSNK | |
| | | ALPAPIEKTISKAKGQPREPQVYTLPPSREEMTKNQVSLTCLVKGFYPSDIAVEWES | |
| | | NGQPENNYKTTPPVLDSDGSFFLYSKLTVDKSRWQQGNVFSCSVMHEALHNHYT | |
| | | QKSLSLSPGK | |
| iPS:361043 | 2F11.004 | QVQLVESGGGVVQPGRSLRLSCAASGFTFSSYGMHWVRQAPGKGLEWVAVIWY | 513 |
| | | DASNKYYADAVKGRFTISRDNSKNTLYLQMNSLRAEDTAVYYCARDRTIFGVVL | |
| | | DYWGQGTLVTVSSASTKGPSVFPLAPSSKSTSGGTAALGCLVKDYFPEPVTVSWN | |
| | | SGALTSGVHTFPAVLQSSGLYSLSSVVTVPSSSLGTQTYICNVNHKPSNTKVDKKV | |
| | | EPKSCDKTHTCPPCPAPELLGGPSVFLFPPKPKDTLMISRTPEVTCVVVDVSHEDPE | |
| | | VKFNWYVDGVEVHNAKTKPCEEQYGSTYRCVSVLTVLHQDWLNGKEYKCKVSN | |
| | | KALPAPIEKTISKAKGQPREPQVYTLPPSREEMTKNQVSLTCLVKGFYPSDIAVEWE | |
| | | SNGQPENNYKTTPPVLDSDGSFFLYSKLTVDKSRWQQGNVFSCSVMHEALHNHY | |
| | | TQKSLSLSPGK | |
| iPS:361049 | 2F11.005 | QVQLVESGGGVVQPGRSLRLSCAASGFTFSSYGMHWVRQAPGKGLEWVAVIWY | 514 |
| | | DASNKYYADAVKGRFTISRDNSKNTLYLQMNSLRAEDTAVYYCARDRTIFGVVL | |
| | | DYWGQGTLVTVSSASTKGPSVFPLAPSSKSTSGGTAALGCLVKDYFPEPVTVSWN | |
| | | SGALTSGVHTFPAVLQSSGLYSLSSVVTVPSSSLGTQTYICNVNHKPSNTKVDKKV | |
| | | EPKSCDKTHTCPPCPAPELLGGPSVFLFPPKPKDTLMISRTPEVTCVVVDVSHEDPE | |
| | | VKFNWYVDGVEVHNAKTKPCEEQYGSTYRCVSVLTVLHQDWLNGKEYKCKVSN | |
| | | KALPAPIEKTISKAKGQPREPQVYTLPPSREEMTKNQVSLTCLVKGFYPSDIAVEWE | |
| | | SNGQPENNYKTTPPVLDSDGSFFLYSKLTVDKSRWQQGNVFSCSVMHEALHNHY | |
| | | TQKSLSLSPGK | |
| iPS:361055 | 2F11.006 | QVQLVESGGGVVQPGRSLRLSCAASGFTFSSYGMHWVRQAPGKGLEWVAVIWY | 515 |
| | | DASNKYYADAVKGRFTISSDNSKNTLYLQMNSLRAEDTAVYYCARDRTIFGVVLD | |
| | | YWGQGTLVTVSSASTKGPSVFPLAPSSKSTSGGTAALGCLVKDYFPEPVTVSWNS | |
| | | GALTSGVHTFPAVLQSSGLYSLSSVVTVPSSSLGTQTYICNVNHKPSNTKVDKKVE | |
| | | PKSCDKTHTCPPCPAPELLGGPSVFLFPPKPKDTLMISRTPEVTCVVVDVSHEDPEV | |
| | | KFNWYVDGVEVHNAKTKPCEEQYGSTYRCVSVLTVLHQDWLNGKEYKCKVSNK | |
| | | ALPAPIEKTISKAKGQPREPQVYTLPPSREEMTKNQVSLTCLVKGFYPSDIAVEWES | |
| | | NGQPENNYKTTPPVLDSDGSFFLYSKLTVDKSRWQQGNVFSCSVMHEALHNHYT | |
| | | QKSLSLSPGK | |
| iPS:361059 | 2F11.007 | QVQLVESGGGVVQPGRSLRLSCAASGFTFSSYGMHWVRQAPGKGLEWVAVIWY | 516 |
| | | DASNKYYADAVKGRFTISSDNSKNTLYLQMNSLRAEDTAVYYCARDRTIFGVVLD | |
| | | YWGQGTLVTVSSASTKGPSVFPLAPSSKSTSGGTAALGCLVKDYFPEPVTVSWNS | |
| | | GALTSGVHTFPAVLQSSGLYSLSSVVTVPSSSLGTQTYICNVNHKPSNTKVDKKVE | |
| | | PKSCDKTHTCPPCPAPELLGGPSVFLFPPKPKDTLMISRTPEVTCVVVDVSHEDPEV | |
| | | KFNWYVDGVEVHNAKTKPCEEQYGSTYRCVSVLTVLHQDWLNGKEYKCKVSNK | |
| | | ALPAPIEKTISKAKGQPREPQVYTLPPSREEMTKNQVSLTCLVKGFYPSDIAVEWES | |
| | | NGQPENNYKTTPPVLDSDGSFFLYSKLTVDKSRWQQGNVFSCSVMHEALHNHYT | |
| | | QKSLSLSPGK | |
| iPS:361063 | 2F11.008 | QVQLVESGGGVVQPGRSLRLSCAASGFTFSSYGMHWVRQAPGKGLEWVAVIWY | 517 |
| | | DASNKYYADAVKGRFTISRDNSKNTLYLQMNSLRAEDTAVYYCARDRTIFGVVL | |
| | | DYWGQGTLVTVSSASTKGPSVFPLAPSSKSTSGGTAALGCLVKDYFPEPVTVSWN | |
| | | SGALTSGVHTFPAVLQSSGLYSLSSVVTVPSSSLGTQTYICNVNHKPSNTKVDKKV | |
| | | EPKSCDKTHTCPPCPAPELLGGPSVFLFPPKPKDTLMISRTPEVTCVVVDVSHEDPE | |
| | | VKFNWYVDGVEVHNAKTKPCEEQYGSTYRCVSVLTVLHQDWLNGKEYKCKVSN | |
| | | KALPAPIEKTISKAKGQPREPQVYTLPPSREEMTKNQVSLTCLVKGFYPSDIAVEWE | |
| | | SNGQPENNYKTTPPVLDSDGSFFLYSKLTVDKSRWQQGNVFSCSVMHEALHNHY | |
| | | TQKSLSLSPGK | |
| iPS:359949 | 2F11.009 | QVQLVESGGGVVQPGRSLRLSCAASGFTFSSYGMHWVRQAPGKGLEWVAVIWY | 518 |
| | | DASNKYYADSVKGRFTISRDNSKNTLYLQMNSLRAEDTAVYYCARDRTIFGVVLD | |
| | | YWGQGTLVTVSSASTKGPSVFPLAPSSKSTSGGTAALGCLVKDYFPEPVTVSWNS | |
| | | GALTSGVHTFPAVLQSSGLYSLSSVVTVPSSSLGTQTYICNVNHKPSNTKVDKKVE | |
| | | PKSCDKTHTCPPCPAPELLGGPSVFLFPPKPKDTLMISRTPEVTCVVVDVSHEDPEV | |
| | | KFNWYVDGVEVHNAKTKPCEEQYGSTYRCVSVLTVLHQDWLNGKEYKCKVSNK | |
| | | ALPAPIEKTISKAKGQPREPQVYTLPPSREEMTKNQVSLTCLVKGFYPSDIAVEWES | |
| | | NGQPENNYKTTPPVLDSDGSFFLYSKLTVDKSRWQQGNVFSCSVMHEALHNHYT | |
| | | QKSLSLSPGK | |
| iPS:359956 | 2F11.010 | QVQLVESGGGVVQPGRSLRLSCAASGFTFSSYGMHWVRQAPGKGLEWVAVIWY | 519 |
| | | DGSNKYYADAVKGRFTISRDNSKNTLYLQMNSLRAEDTAVYYCARDRTIFGVVL | |
| | | DYWGQGTLVTVSSASTKGPSVFPLAPSSKSTSGGTAALGCLVKDYFPEPVTVSWN | |
| | | SGALTSGVHTFPAVLQSSGLYSLSSVVTVPSSSLGTQTYICNVNHKPSNTKVDKKV | |
| | | EPKSCDKTHTCPPCPAPELLGGPSVFLFPPKPKDTLMISRTPEVTCVVVDVSHEDPE | |
| | | VKFNWYVDGVEVHNAKTKPCEEQYGSTYRCVSVLTVLHQDWLNGKEYKCKVSN | |
| | | KALPAPIEKTISKAKGQPREPQVYTLPPSREEMTKNQVSLTCLVKGFYPSDIAVEWE | |
| | | SNGQPENNYKTTPPVLDSDGSFFLYSKLTVDKSRWQQGNVFSCSVMHEALHNHY | |
| | | TQKSLSLSPGK | |
| iPS:359865 | 6H1.002 | QVQLVESGGGVVQPGRSLRLSCAASGFTFSYFGMHWVRQAPGKGLEWVAVIWY | 520 |
| | | DASNKYYADAVKGRFTISRDNSKNTLYLQMNSLRAEDTAVYYCARDGTIFGVLL | |
| | | GDYWGQGTLVTVSSASTKGPSVFPLAPSSKSTSGGTAALGCLVKDYFPEPVTVSW | |
| | | NSGALTSGVHTFPAVLQSSGLYSLSSVVTVPSSSLGTQTYICNVNHKPSNTKVDKK | |
| | | VEPKSCDKTHTCPPCPAPELLGGPSVFLFPPKPKDTLMISRTPEVTCVVVDVSHEDP | |
| | | EVKFNWYVDGVEVHNAKTKPCEEQYGSTYRCVSVLTVLHQDWLNGKEYKCKVS | |
| | | NKALPAPIEKTISKAKGQPREPQVYTLPPSREEMTKNQVSLTCLVKGFYPSDIAVE | |
| | | WESNGQPENNYKTTPPVLDSDGSFFLYSKLTVDKSRWQQGNVFSCSVMHEALHN | |
| | | HYTQKSLSLSPGK | |
| iPS:359869 | 6H1.003 | QVQLVESGGGVVQPGRSLRLSCAASGFTFSYFGMHWVRQAPGKGLEWVAVIWY | 521 |
| | | DASNKYYADAVKGRFTISRDNSKNTLYLQMNSLRAEDTAVYYCARDRTIFGVLLG | |
| | | DYWGQGTLVTVSSASTKGPSVFPLAPSSKSTSGGTAALGCLVKDYFPEPVTVSWN | |
| | | SGALTSGVHTFPAVLQSSGLYSLSSVVTVPSSSLGTQTYICNVNHKPSNTKVDKKV | |
| | | EPKSCDKTHTCPPCPAPELLGGPSVFLFPPKPKDTLMISRTPEVTCVVVDVSHEDPE | |
| | | VKFNWYVDGVEVHNAKTKPCEEQYGSTYRCVSVLTVLHQDWLNGKEYKCKVSN | |
| | | KALPAPIEKTISKAKGQPREPQVYTLPPSREEMTKNQVSLTCLVKGFYPSDIAVEWE | |
| | | SNGQPENNYKTTPPVLDSDGSFFLYSKLTVDKSRWQQGNVFSCSVMHEALHNHY | |
| | | TQKSLSLSPGK | |
| iPS:359873 | 6H1.004 | QVQLVESGGGVVQPGRSLRLSCAASGFTFSYFGMHWVRQAPGKGLEWVAVIWY | 522 |
| | | DASNKYYADAVKGRFTISRDNSKNTLYLQMNSLRAEDTAVYYCARDGTIFGVLL | |
| | | GDYWGQGTLVTVSSASTKGPSVFPLAPSSKSTSGGTAALGCLVKDYFPEPVTVSW | |
| | | NSGALTSGVHTFPAVLQSSGLYSLSSVVTVPSSSLGTQTYICNVNHKPSNTKVDKK | |
| | | VEPKSCDKTHTCPPCPAPELLGGPSVFLFPPKPKDTLMISRTPEVTCVVVDVSHEDP | |
| | | EVKFNWYVDGVEVHNAKTKPCEEQYGSTYRCVSVLTVLHQDWLNGKEYKCKVS | |
| | | NKALPAPIEKTISKAKGQPREPQVYTLPPSREEMTKNQVSLTCLVKGFYPSDIAVE | |
| | | WESNGQPENNYKTTPPVLDSDGSFFLYSKLTVDKSRWQQGNVFSCSVMHEALHN | |
| | | HYTQKSLSLSPGK | |
| iPS:359877 | 6H1.005 | QVQLVESGGGVVQPGRSLRLSCAASGFTFSYFGMHWVRQAPGKGLEWVAVIWY | 523 |
| | | DASNKYYADAVKGRFTISRDNSKNTLYLQMNSLRAEDTAVYYCARDRTIFGVLLG | |
| | | DYWGQGTLVTVSSASTKGPSVFPLAPSSKSTSGGTAALGCLVKDYFPEPVTVSWN | |
| | | SGALTSGVHTFPAVLQSSGLYSLSSVVTVPSSSLGTQTYICNVNHKPSNTKVDKKV | |
| | | EPKSCDKTHTCPPCPAPELLGGPSVFLFPPKPKDTLMISRTPEVTCVVVDVSHEDPE | |
| | | VKFNWYVDGVEVHNAKTKPCEEQYGSTYRCVSVLTVLHQDWLNGKEYKCKVSN | |
| | | KALPAPIEKTISKAKGQPREPQVYTLPPSREEMTKNQVSLTCLVKGFYPSDIAVEWE | |
| | | SNGQPENNYKTTPPVLDSDGSFFLYSKLTVDKSRWQQGNVFSCSVMHEALHNHY | |
| | | TQKSLSLSPGK | |
| iPS:361067 | 6H1.006 | QVQLVESGGGVVQPGRSLRLSCAASGFTFSYFGMHWVRQAPGKGLEWVAVIWY | 524 |
| | | DGSNKYYADSVKGRFTISRDNSKNTLYLQMNSLRAEDTAVYYCARDGTIFGVLLG | |
| | | DYWGQGTLVTVSSASTKGPSVFPLAPSSKSTSGGTAALGCLVKDYFPEPVTVSWN | |
| | | SGALTSGVHTFPAVLQSSGLYSLSSVVTVPSSSLGTQTYICNVNHKPSNTKVDKKV | |
| | | EPKSCDKTHTCPPCPAPELLGGPSVFLFPPKPKDTLMISRTPEVTCVVVDVSHEDPE | |
| | | VKFNWYVDGVEVHNAKTKPCEEQYGSTYRCVSVLTVLHQDWLNGKEYKCKVSN | |
| | | KALPAPIEKTISKAKGQPREPQVYTLPPSREEMTKNQVSLTCLVKGFYPSDIAVEWE | |
| | | SNGQPENNYKTTPPVLDSDGSFFLYSKLTVDKSRWQQGNVFSCSVMHEALHNHY | |
| | | TQKSLSLSPGK | |
| iPS:361071 | 6H1.007 | QVQLVESGGGVVQPGRSLRLSCAASGFTFSYFGMHWVRQAPGKGLEWVAVIWY | 525 |
| | | DASNKYYADSVKGRFTISRDNSKNTLYLQMNSLRAEDTAVYYCARDGTIFGVLLG | |
| | | DYWGQGTLVTVSSASTKGPSVFPLAPSSKSTSGGTAALGCLVKDYFPEPVTVSWN | |
| | | SGALTSGVHTFPAVLQSSGLYSLSSVVTVPSSSLGTQTYICNVNHKPSNTKVDKKV | |
| | | EPKSCDKTHTCPPCPAPELLGGPSVFLFPPKPKDTLMISRTPEVTCVVVDVSHEDPE | |
| | | VKFNWYVDGVEVHNAKTKPCEEQYGSTYRCVSVLTVLHQDWLNGKEYKCKVSN | |
| | | KALPAPIEKTISKAKGQPREPQVYTLPPSREEMTKNQVSLTCLVKGFYPSDIAVEWE | |
| | | SNGQPENNYKTTPPVLDSDGSFFLYSKLTVDKSRWQQGNVFSCSVMHEALHNHY | |
| | | TQKSLSLSPGK | |
| iPS:361075 | 6H1.008 | QVQLVESGGGVVQPGRSLRLSCAASGFTFSYFGMHWVRQAPGKGLEWVAVIWY | 526 |
| | | DGSNKYYADAVKGRFTISRDNSKNTLYLQMNSLRAEDTAVYYCARDGTIFGVLL | |
| | | GDYWGQGTLVTVSSASTKGPSVFPLAPSSKSTSGGTAALGCLVKDYFPEPVTVSW | |
| | | NSGALTSGVHTFPAVLQSSGLYSLSSVVTVPSSSLGTQTYICNVNHKPSNTKVDKK | |
| | | VEPKSCDKTHTCPPCPAPELLGGPSVFLFPPKPKDTLMISRTPEVTCVVVDVSHEDP | |
| | | EVKFNWYVDGVEVHNAKTKPCEEQYGSTYRCVSVLTVLHQDWLNGKEYKCKVS | |
| | | NKALPAPIEKTISKAKGQPREPQVYTLPPSREEMTKNQVSLTCLVKGFYPSDIAVE | |
| | | WESNGQPENNYKTTPPVLDSDGSFFLYSKLTVDKSRWQQGNVFSCSVMHEALHN | |
| | | HYTQKSLSLSPGK | |
| iPS:361079 | 6A5.004.001 | QVQLVESGGGVVQPGRSLRLSCAASGFSFSSYGMHWVRQPPGKGLEWVAAIWYD | 527 |
| | | ANNKYYADAVKGRFTISRDSSKNTLYLQMNSLRAEDTAVYYCARDRTIFGVVLEY | |
| | | WGQGTLVTVSSASTKGPSVFPLAPSSKSTSGGTAALGCLVKDYFPEPVTVSWNSG | |
| | | ALTSGVHTFPAVLQSSGLYSLSSVVTVPSSSLGTQTYICNVNHKPSNTKVDKKVEP | |
| | | KSCDKTHTCPPCPAPELLGGPSVFLFPPKPKDTLMISRTPEVTCVVVDVSHEDPEVK | |
| | | FNWYVDGVEVHNAKTKPCEEQYGSTYRCVSVLTVLHQDWLNGKEYKCKVSNKA | |
| | | LPAPIEKTISKAKGQPREPQVYTLPPSREEMTKNQVSLTCLVKGFYPSDIAVEWESN | |
| | | GQPENNYKTTPPVLDSDGSFFLYSKLTVDKSRWQQGNVFSCSVMHEALHNHYTQ | |
| | | KSLSLSPGK | |
| iPS:361085 | 6A5.004.002 | QVQLVESGGGVVQPGRSLRLSCAASGFSFSSYGMHWVRQPPGKGLEWVAAIWYD | 528 |
| | | ANNKYYADAVKGRFTISRDSSKNTLYLQMNSLRAEDTAVYYCARDRTIFGVVLEY | |
| | | WGQGTLVTVSSASTKGPSVFPLAPSSKSTSGGTAALGCLVKDYFPEPVTVSWNSG | |
| | | ALTSGVHTFPAVLQSSGLYSLSSVVTVPSSSLGTQTYICNVNHKPSNTKVDKKVEP | |
| | | KSCDKTHTCPPCPAPELLGGPSVFLFPPKPKDTLMISRTPEVTCVVVDVSHEDPEVK | |
| | | FNWYVDGVEVHNAKTKPCEEQYGSTYRCVSVLTVLHQDWLNGKEYKCKVSNKA | |
| | | LPAPIEKTISKAKGQPREPQVYTLPPSREEMTKNQVSLTCLVKGFYPSDIAVEWESN | |
| | | GQPENNYKTTPPVLDSDGSFFLYSKLTVDKSRWQQGNVFSCSVMHEALHNHYTQ | |
| | | KSLSLSPGK | |
| iPS:361091 | 6A5.004.003 | QVQLVESGGGVVQPGRSLRLSCAASGFSFSSYGMHWVRQPPGKGLEWVAAIWYD | 529 |
| | | ANNKYYADAVKGRFTISRDSSKNTLYLQMNSLRAEDTAVYYCARDRTIFGVVLEY | |
| | | LGQGTLVTVSSASTKGPSVFPLAPSSKSTSGGTAALGCLVKDYFPEPVTVSWNSGA | |
| | | LTSGVHTFPAVLQSSGLYSLSSVVTVPSSSLGTQTYICNVNHKPSNTKVDKKVEPK | |
| | | SCDKTHTCPPCPAPELLGGPSVFLFPPKPKDTLMISRTPEVTCVVVDVSHEDPEVKF | |
| | | NWYVDGVEVHNAKTKPCEEQYGSTYRCVSVLTVLHQDWLNGKEYKCKVSNKAL | |
| | | PAPIEKTISKAKGQPREPQVYTLPPSREEMTKNQVSLTCLVKGFYPSDIAVEWESNG | |
| | | QPENNYKTTPPVLDSDGSFFLYSKLTVDKSRWQQGNVFSCSVMHEALHNHYTQK | |
| | | SLSLSPGK | |
| iPS:361095 | 6A5.004.004 | QVQLVESGGGVVQPGRSLRLSCAASGFSFSSYGMHWVRQPPGKGLEWVAAIWYD | 530 |
| | | ANNKYYADAVKGRFTISRDSSKNTLYLQMNSLRAEDTAVYYCARDRTIFGVVLEY | |
| | | WGQGTLVTVSSASTKGPSVFPLAPSSKSTSGGTAALGCLVKDYFPEPVTVSWNSG | |
| | | ALTSGVHTFPAVLQSSGLYSLSSVVTVPSSSLGTQTYICNVNHKPSNTKVDKKVEP | |
| | | KSCDKTHTCPPCPAPELLGGPSVFLFPPKPKDTLMISRTPEVTCVVVDVSHEDPEVK | |
| | | FNWYVDGVEVHNAKTKPCEEQYGSTYRCVSVLTVLHQDWLNGKEYKCKVSNKA | |
| | | LPAPIEKTISKAKGQPREPQVYTLPPSREEMTKNQVSLTCLVKGFYPSDIAVEWESN | |
| | | GQPENNYKTTPPVLDSDGSFFLYSKLTVDKSRWQQGNVFSCSVMHEALHNHYTQ | |
| | | KSLSLSPGK | |
| iPS:361101 | 6A5.004.005 | QVQLVESGGGVVQPGRSLRLSCAASGFSFSSYGMHWVRQPPGKGLEWVAAIWYD | 531 |
| | | ANNKYYADAVKGRFTISRDSSKNTLYLQMNSLRAEDTAVYYCARDRTIFGVVLEY | |
| | | LGQGTLVTVSSASTKGPSVFPLAPSSKSTSGGTAALGCLVKDYFPEPVTVSWNSGA | |
| | | LTSGVHTFPAVLQSSGLYSLSSVVTVPSSSLGTQTYICNVNHKPSNTKVDKKVEPK | |
| | | SCDKTHTCPPCPAPELLGGPSVFLFPPKPKDTLMISRTPEVTCVVVDVSHEDPEVKF | |
| | | NWYVDGVEVHNAKTKPCEEQYGSTYRCVSVLTVLHQDWLNGKEYKCKVSNKAL | |
| | | PAPIEKTISKAKGQPREPQVYTLPPSREEMTKNQVSLTCLVKGFYPSDIAVEWESNG | |
| | | QPENNYKTTPPVLDSDGSFFLYSKLTVDKSRWQQGNVFSCSVMHEALHNHYTQK | |
| | | SLSLSPGK | |
| iPS:361105 | 6A5.004.006 | QVQLVESGGGVVQPGRSLRLSCAASGFSFSSYGMHWVRQPPGKGLEWVAAIWYD | 532 |
| | | ANNKYYADAVKGRFTISRDSSKNTLYLQMNSLRAEDTAVYYCARDRTIFGVVLEY | |
| | | LGQGTLVTVSSASTKGPSVFPLAPSSKSTSGGTAALGCLVKDYFPEPVTVSWNSGA | |
| | | LTSGVHTFPAVLQSSGLYSLSSVVTVPSSSLGTQTYICNVNHKPSNTKVDKKVEPK | |
| | | SCDKTHTCPPCPAPELLGGPSVFLFPPKPKDTLMISRTPEVTCVVVDVSHEDPEVKF | |
| | | NWYVDGVEVHNAKTKPCEEQYGSTYRCVSVLTVLHQDWLNGKEYKCKVSNKAL | |
| | | PAPIEKTISKAKGQPREPQVYTLPPSREEMTKNQVSLTCLVKGFYPSDIAVEWESNG | |
| | | QPENNYKTTPPVLDSDGSFFLYSKLTVDKSRWQQGNVFSCSVMHEALHNHYTQK | |
| | | SLSLSPGK | |
| iPS:361109 | 6A5.004.007 | QVQLVESGGGVVQPGRSLRLSCAASGFSFSSYGMHWVRQPPGKGLEWVAAIWYD | 533 |
| | | ANNKYYADAVKGRFTISRDSSKNTLYLQMNSLRAEDTAVYYCARDRTIFGVVLEY | |
| | | WGQGTLVTVSSASTKGPSVFPLAPSSKSTSGGTAALGCLVKDYFPEPVTVSWNSG | |
| | | ALTSGVHTFPAVLQSSGLYSLSSVVTVPSSSLGTQTYICNVNHKPSNTKVDKKVEP | |
| | | KSCDKTHTCPPCPAPELLGGPSVFLFPPKPKDTLMISRTPEVTCVVVDVSHEDPEVK | |
| | | FNWYVDGVEVHNAKTKPCEEQYGSTYRCVSVLTVLHQDWLNGKEYKCKVSNKA | |
| | | LPAPIEKTISKAKGQPREPQVYTLPPSREEMTKNQVSLTCLVKGFYPSDIAVEWESN | |
| | | GQPENNYKTTPPVLDSDGSFFLYSKLTVDKSRWQQGNVFSCSVMHEALHNHYTQ | |
| | | KSLSLSPGK | |
| iPS:361113 | 6A5.004.008 | QVQLVESGGGVVQPGRSLRLSCAASGFSFSSYGMHWVRQPPGKGLEWVAAIWYD | 534 |
| | | GNNKYYADAVKGRFTISRDSSKNTLYLQMNSLRAEDTAVYYCARDRTIFGVVLEY | |
| | | WGQGTLVTVSSASTKGPSVFPLAPSSKSTSGGTAALGCLVKDYFPEPVTVSWNSG | |
| | | ALTSGVHTFPAVLQSSGLYSLSSVVTVPSSSLGTQTYICNVNHKPSNTKVDKKVEP | |
| | | KSCDKTHTCPPCPAPELLGGPSVFLFPPKPKDTLMISRTPEVTCVVVDVSHEDPEVK | |
| | | FNWYVDGVEVHNAKTKPCEEQYGSTYRCVSVLTVLHQDWLNGKEYKCKVSNKA | |
| | | LPAPIEKTISKAKGQPREPQVYTLPPSREEMTKNQVSLTCLVKGFYPSDIAVEWESN | |
| | | GQPENNYKTTPPVLDSDGSFFLYSKLTVDKSRWQQGNVFSCSVMHEALHNHYTQ | |
| | | KSLSLSPGK | |
| iPS:361120 | 6A5.004.009 | QVQLVESGGGVVQPGRSLRLSCAASGFSFSSYGMHWVRQPPGKGLEWVAAIWYD | 535 |
| | | ANNKYYADSVKGRFTISRDSSKNTLYLQMNSLRAEDTAVYYCARDRTIFGVVLEY | |
| | | WGQGTLVTVSSASTKGPSVFPLAPSSKSTSGGTAALGCLVKDYFPEPVTVSWNSG | |
| | | ALTSGVHTFPAVLQSSGLYSLSSVVTVPSSSLGTQTYICNVNHKPSNTKVDKKVEP | |
| | | KSCDKTHTCPPCPAPELLGGPSVFLFPPKPKDTLMISRTPEVTCVVVDVSHEDPEVK | |
| | | FNWYVDGVEVHNAKTKPCEEQYGSTYRCVSVLTVLHQDWLNGKEYKCKVSNKA | |
| | | LPAPIEKTISKAKGQPREPQVYTLPPSREEMTKNQVSLTCLVKGFYPSDIAVEWESN | |
| | | GQPENNYKTTPPVLDSDGSFFLYSKLTVDKSRWQQGNVFSCSVMHEALHNHYTQ | |
| | | KSLSLSPGK | |
| iPS:359896 | 6A5.004.010 | QVQLVESGGGVVQPGRSLRLSCAASGFSFSSYGMHWVRQPPGKGLEWVAAIWYD | 536 |
| | | ANNKYYADAVKGRFTISRDSSKNTLYLQMNSLRAEDTAVYYCARDRTIFGVVLEY | |
| | | WGQGTLVTVSSASTKGPSVFPLAPSSKSTSGGTAALGCLVKDYFPEPVTVSWNSG | |
| | | ALTSGVHTFPAVLQSSGLYSLSSVVTVPSSSLGTQTYICNVNHKPSNTKVDKKVEP | |
| | | KSCDKTHTCPPCPAPELLGGPSVFLFPPKPKDTLMISRTPEVTCVVVDVSHEDPEVK | |
| | | FNWYVDGVEVHNAKTKPCEEQYGSTYRCVSVLTVLHQDWLNGKEYKCKVSNKA | |
| | | LPAPIEKTISKAKGQPREPQVYTLPPSREEMTKNQVSLTCLVKGFYPSDIAVEWESN | |
| | | GQPENNYKTTPPVLDSDGSFFLYSKLTVDKSRWQQGNVFSCSVMHEALHNHYTQ | |
| | | KSLSLSPGK | |
| iPS:359890 | 6A5.004.011 | QVQLVESGGGVVQPGRSLRLSCAASGFSFSSYGMHWVRQPPGKGLEWVAAIWYD | 537 |
| | | ANNKYYADAVKGRFTISRDSSKNTLYLQMNSLRAEDTAVYYCARDRTIFGVVLEY | |
| | | LGQGTLVTVSSASTKGPSVFPLAPSSKSTSGGTAALGCLVKDYFPEPVTVSWNSGA | |
| | | LTSGVHTFPAVLQSSGLYSLSSVVTVPSSSLGTQTYICNVNHKPSNTKVDKKVEPK | |
| | | SCDKTHTCPPCPAPELLGGPSVFLFPPKPKDTLMISRTPEVTCVVVDVSHEDPEVKF | |
| | | NWYVDGVEVHNAKTKPCEEQYGSTYRCVSVLTVLHQDWLNGKEYKCKVSNKAL | |
| | | PAPIEKTISKAKGQPREPQVYTLPPSREEMTKNQVSLTCLVKGFYPSDIAVEWESNG | |
| | | QPENNYKTTPPVLDSDGSFFLYSKLTVDKSRWQQGNVFSCSVMHEALHNHYTQK | |
| | | SLSLSPGK | |
| iPS:359567 | 2A11.002 | QVQLVESGGGVVQPGRSLRLSCAASGFSFSSYGMHWVRQAPGKGLEWVAVIWY | 538 |
| | | DASNKYYEDAVKGRFTISRDNSKNTLFLQVNSLRAEDTAVYYCARGITIFGHGFEY | |
| | | WGQGTLVTVSSASTKGPSVFPLAPSSKSTSGGTAALGCLVKDYFPEPVTVSWNSG | |
| | | ALTSGVHTFPAVLQSSGLYSLSSVVTVPSSSLGTQTYICNVNHKPSNTKVDKKVEP | |
| | | KSCDKTHTCPPCPAPELLGGPSVFLFPPKPKDTLMISRTPEVTCVVVDVSHEDPEVK | |
| | | FNWYVDGVEVHNAKTKPCEEQYGSTYRCVSVLTVLHQDWLNGKEYKCKVSNKA | |
| | | LPAPIEKTISKAKGQPREPQVYTLPPSREEMTKNQVSLTCLVKGFYPSDIAVEWESN | |
| | | GQPENNYKTTPPVLDSDGSFFLYSKLTVDKSRWQQGNVFSCSVMHEALHNHYTQ | |
| | | KSLSLSPGK | |
| iPS:335965 | 2A11.003 | QVQLVESGGGVVQPGRSLRLSCAASGFSFSSYGMHWVRQAPGKGLEWVAVIWY | 539 |
| | | DGSNKYYEDSVKGRFTISRDNSKNTLFLQVNSLRAEDTAVYYCARGITIFGHGFEY | |
| | | WGQGTLVTVSSASTKGPSVFPLAPSSKSTSGGTAALGCLVKDYFPEPVTVSWNSG | |
| | | ALTSGVHTFPAVLQSSGLYSLSSVVTVPSSSLGTQTYICNVNHKPSNTKVDKKVEP | |
| | | KSCDKTHTCPPCPAPELLGGPSVFLFPPKPKDTLMISRTPEVTCVVVDVSHEDPEVK | |
| | | FNWYVDGVEVHNAKTKPCEEQYGSTYRCVSVLTVLHQDWLNGKEYKCKVSNKA | |
| | | LPAPIEKTISKAKGQPREPQVYTLPPSREEMTKNQVSLTCLVKGFYPSDIAVEWESN | |
| | | GQPENNYKTTPPVLDSDGSFFLYSKLTVDKSRWQQGNVFSCSVMHEALHNHYTQ | |
| | | KSLSLSPGK | |
| iPS:361158 | 2A11.004 | QVQLVESGGGVVQPGRSLRLSCAASGFSFSSYGMHWVRQAPGKGLEWVAVIWY | 540 |
| | | DGSNKYYEDAVKGRFTISRDNSKNTLFLQVNSLRAEDTAVYYCARGITIFGHGFEY | |
| | | WGQGTLVTVSSASTKGPSVFPLAPSSKSTSGGTAALGCLVKDYFPEPVTVSWNSG | |
| | | ALTSGVHTFPAVLQSSGLYSLSSVVTVPSSSLGTQTYICNVNHKPSNTKVDKKVEP | |
| | | KSCDKTHTCPPCPAPELLGGPSVFLFPPKPKDTLMISRTPEVTCVVVDVSHEDPEVK | |
| | | FNWYVDGVEVHNAKTKPCEEQYGSTYRCVSVLTVLHQDWLNGKEYKCKVSNKA | |
| | | LPAPIEKTISKAKGQPREPQVYTLPPSREEMTKNQVSLTCLVKGFYPSDIAVEWESN | |
| | | GQPENNYKTTPPVLDSDGSFFLYSKLTVDKSRWQQGNVFSCSVMHEALHNHYTQ | |
| | | KSLSLSPGK | |
| iPS:361165 | 2A11.005 | QVQLVESGGGVVQPGRSLRLSCAASGFSFSSYGMHWVRQAPGKGLEWVAVIWY | 541 |
| | | DASNKYYEDSVKGRFTISRDNSKNTLFLQVNSLRAEDTAVYYCARGITIFGHGFEY | |
| | | WGQGTLVTVSSASTKGPSVFPLAPSSKSTSGGTAALGCLVKDYFPEPVTVSWNSG | |
| | | ALTSGVHTFPAVLQSSGLYSLSSVVTVPSSSLGTQTYICNVNHKPSNTKVDKKVEP | |
| | | KSCDKTHTCPPCPAPELLGGPSVFLFPPKPKDTLMISRTPEVTCVVVDVSHEDPEVK | |
| | | FNWYVDGVEVHNAKTKPCEEQYGSTYRCVSVLTVLHQDWLNGKEYKCKVSNKA | |
| | | LPAPIEKTISKAKGQPREPQVYTLPPSREEMTKNQVSLTCLVKGFYPSDIAVEWESN | |
| | | GQPENNYKTTPPVLDSDGSFFLYSKLTVDKSRWQQGNVFSCSVMHEALHNHYTQ | |
| | | KSLSLSPGK | |
| iPS:361172 | 2G10 LC1.003 | QVQLVESGGGVVQPGRSLRLSCAASGFTFSNYGMHWVRQAPGEGLEWVAAIWFD | 542 |
| | | ASDKYYADAVKGRFTISRDNSKNTLYLQMNSLRAEDTAVYYCARDQAIFGVVPD | |
| | | YWGQGTLVTVSSASTKGPSVFPLAPSSKSTSGGTAALGCLVKDYFPEPVTVSWNS | |
| | | GALTSGVHTFPAVLQSSGLYSLSSVVTVPSSSLGTQTYICNVNHKPSNTKVDKKVE | |
| | | PKSCDKTHTCPPCPAPELLGGPSVFLFPPKPKDTLMISRTPEVTCVVVDVSHEDPEV | |
| | | KFNWYVDGVEVHNAKTKPCEEQYGSTYRCVSVLTVLHQDWLNGKEYKCKVSNK | |
| | | ALPAPIEKTISKAKGQPREPQVYTLPPSREEMTKNQVSLTCLVKGFYPSDIAVEWES | |
| | | NGQPENNYKTTPPVLDSDGSFFLYSKLTVDKSRWQQGNVFSCSVMHEALHNHYT | |
| | | QKSLSLSPGK | |
| iPS:361178 | 2G10 LC1.004 | QVQLVESGGGVVQPGRSLRLSCAASGFTFSNYGMHWVRQAPGEGLEWVAAIWFD | 543 |
| | | ASDKYYADSVKGRFTISRDNSKNTLYLQMNSLRAEDTAVYYCARDQAIFGVVPD | |
| | | YWGQGTLVTVSSASTKGPSVFPLAPSSKSTSGGTAALGCLVKDYFPEPVTVSWNS | |
| | | GALTSGVHTFPAVLQSSGLYSLSSVVTVPSSSLGTQTYICNVNHKPSNTKVDKKVE | |
| | | PKSCDKTHTCPPCPAPELLGGPSVFLFPPKPKDTLMISRTPEVTCVVVDVSHEDPEV | |
| | | KFNWYVDGVEVHNAKTKPCEEQYGSTYRCVSVLTVLHQDWLNGKEYKCKVSNK | |
| | | ALPAPIEKTISKAKGQPREPQVYTLPPSREEMTKNQVSLTCLVKGFYPSDIAVEWES | |
| | | NGQPENNYKTTPPVLDSDGSFFLYSKLTVDKSRWQQGNVFSCSVMHEALHNHYT | |
| | | QKSLSLSPGK | |
| iPS:361185 | 2G10 LC1.005 | QVQLVESGGGVVQPGRSLRLSCAASGFTFSNYGMHWVRQAPGEGLEWVAAIWFD | 544 |
| | | GSDKYYADAVKGRFTISRDNSKNTLYLQMNSLRAEDTAVYYCARDQAIFGVVPD | |
| | | YWGQGTLVTVSSASTKGPSVFPLAPSSKSTSGGTAALGCLVKDYFPEPVTVSWNS | |
| | | GALTSGVHTFPAVLQSSGLYSLSSVVTVPSSSLGTQTYICNVNHKPSNTKVDKKVE | |
| | | PKSCDKTHTCPPCPAPELLGGPSVFLFPPKPKDTLMISRTPEVTCVVVDVSHEDPEV | |
| | | KFNWYVDGVEVHNAKTKPCEEQYGSTYRCVSVLTVLHQDWLNGKEYKCKVSNK | |
| | | ALPAPIEKTISKAKGQPREPQVYTLPPSREEMTKNQVSLTCLVKGFYPSDIAVEWES | |
| | | NGQPENNYKTTPPVLDSDGSFFLYSKLTVDKSRWQQGNVFSCSVMHEALHNHYT | |
| | | QKSLSLSPGK | |
| iPS:361192 | 2G10_LC1.006 | QVQLVESGGGVVQPGRSLRLSCAASGFTFSNYGMHWVRQAPGEGLEWVAAIWFD | 545 |
| | | ASDKYYADAVKGRFTISRDNSKNTLYLQMNSLRAEDTAVYYCARDQAIFGVVPD | |
| | | YWGQGTLVTVSSASTKGPSVFPLAPSSKSTSGGTAALGCLVKDYFPEPVTVSWNS | |
| | | GALTSGVHTFPAVLQSSGLYSLSSVVTVPSSSLGTQTYICNVNHKPSNTKVDKKVE | |
| | | PKSCDKTHTCPPCPAPELLGGPSVFLFPPKPKDTLMISRTPEVTCVVVDVSHEDPEV | |
| | | KFNWYVDGVEVHNAKTKPCEEQYGSTYRCVSVLTVLHQDWLNGKEYKCKVSNK | |
| | | ALPAPIEKTISKAKGQPREPQVYTLPPSREEMTKNQVSLTCLVKGFYPSDIAVEWES | |
| | | NGQPENNYKTTPPVLDSDGSFFLYSKLTVDKSRWQQGNVFSCSVMHEALHNHYT | |
| | | QKSLSLSPGK | |
| iPS:359609 | 2G10_LC1.007 | QVQLVESGGGVVQPGRSLRLSCAASGFTFSNYGMHWVRQAPGKGLEWVAAIWF | 546 |
| | | DASDKYYADAVKGRFTISRDNSKNTLYLQMNSLRAEDTAVYYCARDQAIFGVVP | |
| | | DYWGQGTLVTVSSASTKGPSVFPLAPSSKSTSGGTAALGCLVKDYFPEPVTVSWN | |
| | | SGALTSGVHTFPAVLQSSGLYSLSSVVTVPSSSLGTQTYICNVNHKPSNTKVDKKV | |
| | | EPKSCDKTHTCPPCPAPELLGGPSVFLFPPKPKDTLMISRTPEVTCVVVDVSHEDPE | |
| | | VKFNWYVDGVEVHNAKTKPCEEQYGSTYRCVSVLTVLHQDWLNGKEYKCKVSN | |
| | | KALPAPIEKTISKAKGQPREPQVYTLPPSREEMTKNQVSLTCLVKGFYPSDIAVEWE | |
| | | SNGQPENNYKTTPPVLDSDGSFFLYSKLTVDKSRWQQGNVFSCSVMHEALHNHY | |
| | | TQKSLSLSPGK | |
| iPS:359615 | 2G10_LC1.008 | QVQLVESGGGVVQPGRSLRLSCAASGFTFSNYGMHWVRQAPGKGLEWVAAIWF | 547 |
| | | DASDKYYADAVKGRFTISRDNSKNTLYLQMNSLRAEDTAVYYCARDQAIFGVVP | |
| | | DYWGQGTLVTVSSASTKGPSVFPLAPSSKSTSGGTAALGCLVKDYFPEPVTVSWN | |
| | | SGALTSGVHTFPAVLQSSGLYSLSSVVTVPSSSLGTQTYICNVNHKPSNTKVDKKV | |
| | | EPKSCDKTHTCPPCPAPELLGGPSVFLFPPKPKDTLMISRTPEVTCVVVDVSHEDPE | |
| | | VKFNWYVDGVEVHNAKTKPCEEQYGSTYRCVSVLTVLHQDWLNGKEYKCKVSN | |
| | | KALPAPIEKTISKAKGQPREPQVYTLPPSREEMTKNQVSLTCLVKGFYPSDIAVEWE | |
| | | SNGQPENNYKTTPPVLDSDGSFFLYSKLTVDKSRWQQGNVFSCSVMHEALHNHY | |
| | | TQKSLSLSPGK | |
| iPS:361196 | 2G10 LC1.009 | QVQLVESGGGVVQPGRSLRLSCAASGFTFSNYGMHWVRQAPGEGLEWVAAIWFD | 548 |
| | | ASDKYYADAVKGRFTISRDNSKNTLYLQMNSLRAEDTAVYYCARDQAIFGVVPD | |
| | | YWGQGTLVTVSSASTKGPSVFPLAPSSKSTSGGTAALGCLVKDYFPEPVTVSWNS | |
| | | GALTSGVHTFPAVLQSSGLYSLSSVVTVPSSSLGTQTYICNVNHKPSNTKVDKKVE | |
| | | PKSCDKTHTCPPCPAPELLGGPSVFLFPPKPKDTLMISRTPEVTCVVVDVSHEDPEV | |
| | | KFNWYVDGVEVHNAKTKPCEEQYGSTYRCVSVLTVLHQDWLNGKEYKCKVSNK | |
| | | ALPAPIEKTISKAKGQPREPQVYTLPPSREEMTKNQVSLTCLVKGFYPSDIAVEWES | |
| | | NGQPENNYKTTPPVLDSDGSFFLYSKLTVDKSRWQQGNVFSCSVMHEALHNHYT | |
| | | QKSLSLSPGK | |
| iPS:361202 | 2G10_LC1.010 | QVQLVESGGGVVQPGRSLRLSCAASGFTFSNYGMHWVRQAPGKGLEWVAAIWF | 549 |
| | | DASDKYYADAVKGRFTISRDNSKNTLYLQMNSLRAEDTAVYYCARDQAIFGVVP | |
| | | DYWGQGTLVTVSSASTKGPSVFPLAPSSKSTSGGTAALGCLVKDYFPEPVTVSWN | |
| | | SGALTSGVHTFPAVLQSSGLYSLSSVVTVPSSSLGTQTYICNVNHKPSNTKVDKKV | |
| | | EPKSCDKTHTCPPCPAPELLGGPSVFLFPPKPKDTLMISRTPEVTCVVVDVSHEDPE | |
| | | VKFNWYVDGVEVHNAKTKPCEEQYGSTYRCVSVLTVLHQDWLNGKEYKCKVSN | |
| | | KALPAPIEKTISKAKGQPREPQVYTLPPSREEMTKNQVSLTCLVKGFYPSDIAVEWE | |
| | | SNGQPENNYKTTPPVLDSDGSFFLYSKLTVDKSRWQQGNVFSCSVMHEALHNHY | |
| | | TQKSLSLSPGK | |
| iPS:359644 | 18E3.002 | QVQLQESGPGLVKPSETLSLTCTVSGDSISSGGYYWSWIRQPPGKGLEWIGYIYYS | 550 |
| | | GSTYYNPSLKSRVTISVDTSKNQFSLKLSSVTAADTAVYYCARDRITIFGVVMGGG | |
| | | MDVWGQGTTVTVSSASTKGPSVFPLAPSSKSTSGGTAALGCLVKDYFPEPVTVSW | |
| | | NSGALTSGVHTFPAVLQSSGLYSLSSVVTVPSSSLGTQTYICNVNHKPSNTKVDKK | |
| | | VEPKSCDKTHTCPPCPAPELLGGPSVFLFPPKPKDTLMISRTPEVTCVVVDVSHEDP | |
| | | EVKFNWYVDGVEVHNAKTKPCEEQYGSTYRCVSVLTVLHQDWLNGKEYKCKVS | |
| | | NKALPAPIEKTISKAKGQPREPQVYTLPPSREEMTKNQVSLTCLVKGFYPSDIAVE | |
| | | WESNGQPENNYKTTPPVLDSDGSFFLYSKLTVDKSRWQQGNVFSCSVMHEALHN | |
| | | HYTQKSLSLSPGK | |
| iPS:361206 | 18E3.003 | QVQLQESGPGLVKPSETLSLTCTVSGDSISSGGYYWSWIRQPPGKGLEWIGYIYYS | 551 |
| | | GSTYYNPSLKSRVTISVDTSKNQFSLKLSSVTAADTAVYYCARDRITIFGVVMGGG | |
| | | MDVWGQGTTVTVSSASTKGPSVFPLAPSSKSTSGGTAALGCLVKDYFPEPVTVSW | |
| | | NSGALTSGVHTFPAVLQSSGLYSLSSVVTVPSSSLGTQTYICNVNHKPSNTKVDKK | |
| | | VEPKSCDKTHTCPPCPAPELLGGPSVFLFPPKPKDTLMISRTPEVTCVVVDVSHEDP | |
| | | EVKFNWYVDGVEVHNAKTKPCEEQYGSTYRCVSVLTVLHQDWLNGKEYKCKVS | |
| | | NKALPAPIEKTISKAKGQPREPQVYTLPPSREEMTKNQVSLTCLVKGFYPSDIAVE | |
| | | WESNGQPENNYKTTPPVLDSDGSFFLYSKLTVDKSRWQQGNVFSCSVMHEALHN | |
| | | HYTQKSLSLSPGK | |
| iPS:359628 | 18E3.004 | QVQLQESGPGLVKPSQTLSLTCTVSGDSISSGGYYWSWIRQPPGKGLEWIGYIYYS | 552 |
| | | GSTYYNPSLKSRVTISVDTSKNQFSLKLSSVTAADTAVYYCARDRITIFGVVMGGG | |
| | | MDVWGQGTTVTVSSASTKGPSVFPLAPSSKSTSGGTAALGCLVKDYFPEPVTVSW | |
| | | NSGALTSGVHTFPAVLQSSGLYSLSSVVTVPSSSLGTQTYICNVNHKPSNTKVDKK | |
| | | VEPKSCDKTHTCPPCPAPELLGGPSVFLFPPKPKDTLMISRTPEVTCVVVDVSHEDP | |
| | | EVKFNWYVDGVEVHNAKTKPCEEQYGSTYRCVSVLTVLHQDWLNGKEYKCKVS | |
| | | NKALPAPIEKTISKAKGQPREPQVYTLPPSREEMTKNQVSLTCLVKGFYPSDIAVE | |
| | | WESNGQPENNYKTTPPVLDSDGSFFLYSKLTVDKSRWQQGNVFSCSVMHEALHN | |
| | | HYTQKSLSLSPGK | |
| iPS:359637 | 18E3.005 | QVQLQESGPGLVKPSETLSLTCTVSGDSISSGGYYWSWIRQHPGKGLEWIGYIYYS | 553 |
| | | GSTYYNPSLKSRVTISVDTSKNQFSLKLSSVTAADTAVYYCARDRITIFGVVMGGG | |
| | | MDVWGQGTTVTVSSASTKGPSVFPLAPSSKSTSGGTAALGCLVKDYFPEPVTVSW | |
| | | NSGALTSGVHTFPAVLQSSGLYSLSSVVTVPSSSLGTQTYICNVNHKPSNTKVDKK | |
| | | VEPKSCDKTHTCPPCPAPELLGGPSVFLFPPKPKDTLMISRTPEVTCVVVDVSHEDP | |
| | | EVKFNWYVDGVEVHNAKTKPCEEQYGSTYRCVSVLTVLHQDWLNGKEYKCKVS | |
| | | NKALPAPIEKTISKAKGQPREPQVYTLPPSREEMTKNQVSLTCLVKGFYPSDIAVE | |
| | | WESNGQPENNYKTTPPVLDSDGSFFLYSKLTVDKSRWQQGNVFSCSVMHEALHN | |
| | | HYTQKSLSLSPGK | |
| iPS:361210 | 18E3.006 | QVQLQESGPGLVKPSQTLSLTCTVSGDSISSGGYYWSWIRQHPGKGLEWIGYIYYS | 554 |
| | | GSTYYNPSLKSRVTISVDTSKNQFSLKLSSVTAADTAVYYCARDRITIFGVVMGGG | |
| | | MDVWGQGTTVTVSSASTKGPSVFPLAPSSKSTSGGTAALGCLVKDYFPEPVTVSW | |
| | | NSGALTSGVHTFPAVLQSSGLYSLSSVVTVPSSSLGTQTYICNVNHKPSNTKVDKK | |
| | | VEPKSCDKTHTCPPCPAPELLGGPSVFLFPPKPKDTLMISRTPEVTCVVVDVSHEDP | |
| | | EVKFNWYVDGVEVHNAKTKPCEEQYGSTYRCVSVLTVLHQDWLNGKEYKCKVS | |
| | | NKALPAPIEKTISKAKGQPREPQVYTLPPSREEMTKNQVSLTCLVKGFYPSDIAVE | |
| | | WESNGQPENNYKTTPPVLDSDGSFFLYSKLTVDKSRWQQGNVFSCSVMHEALHN | |
| | | HYTQKSLSLSPGK | |
| iPS:361214 | 18E3.007 | QVQLQESGPGLVKPSETLSLTCTVSGDSISSGGYYWSWIRQHPGKGLEWIGYIYYS | 555 |
| | | GSTYYNPSLKSRVTISVDTSKNQFSLKLSSVTAADTAVYYCARDRITIFGVVMGGG | |
| | | MDVWGQGTTVTVSSASTKGPSVFPLAPSSKSTSGGTAALGCLVKDYFPEPVTVSW | |
| | | NSGALTSGVHTFPAVLQSSGLYSLSSVVTVPSSSLGTQTYICNVNHKPSNTKVDKK | |
| | | VEPKSCDKTHTCPPCPAPELLGGPSVFLFPPKPKDTLMISRTPEVTCVVVDVSHEDP | |
| | | EVKFNWYVDGVEVHNAKTKPCEEQYGSTYRCVSVLTVLHQDWLNGKEYKCKVS | |
| | | NKALPAPIEKTISKAKGQPREPQVYTLPPSREEMTKNQVSLTCLVKGFYPSDIAVE | |
| | | WESNGQPENNYKTTPPVLDSDGSFFLYSKLTVDKSRWQQGNVFSCSVMHEALHN | |
| | | HYTQKSLSLSPGK | |
| iPS:361218 | 18E3.008 | QVQLQESGPGLVKPSQTLSLTCTVSGDSISSGGYYWSWIRQPPGKGLEWIGYIYYS | 556 |
| | | GSTYYNPSLKSRVTISVDTSKNQFSLKLSSVTAADTAVYYCARDRITIFGVVMGGG | |
| | | MDVWGQGTTVTVSSASTKGPSVFPLAPSSKSTSGGTAALGCLVKDYFPEPVTVSW | |
| | | NSGALTSGVHTFPAVLQSSGLYSLSSVVTVPSSSLGTQTYICNVNHKPSNTKVDKK | |
| | | VEPKSCDKTHTCPPCPAPELLGGPSVFLFPPKPKDTLMISRTPEVTCVVVDVSHEDP | |
| | | EVKFNWYVDGVEVHNAKTKPCEEQYGSTYRCVSVLTVLHQDWLNGKEYKCKVS | |
| | | NKALPAPIEKTISKAKGQPREPQVYTLPPSREEMTKNQVSLTCLVKGFYPSDIAVE | |
| | | WESNGQPENNYKTTPPVLDSDGSFFLYSKLTVDKSRWQQGNVFSCSVMHEALHN | |
| | | HYTQKSLSLSPGK | |
| iPS:361222 | 5C2.006 | QVQLVQSGAEVKKPGASVKVSCKASGYTFTGYYIHWVRQAPGQGLEWMGWINP | 557 |
| | | ESGGTDYSQRFQGRVTMTRDTSISTAYMELNRLRSDDTAVYYCAREATIFGMVIV | |
| | | PFDYWGQGTLVTVSSASTKGPSVFPLAPSSKSTSGGTAALGCLVKDYFPEPVTVSW | |
| | | NSGALTSGVHTFPAVLQSSGLYSLSSVVTVPSSSLGTQTYICNVNHKPSNTKVDKK | |
| | | VEPKSCDKTHTCPPCPAPELLGGPSVFLFPPKPKDTLMISRTPEVTCVVVDVSHEDP | |
| | | EVKFNWYVDGVEVHNAKTKPCEEQYGSTYRCVSVLTVLHQDWLNGKEYKCKVS | |
| | | NKALPAPIEKTISKAKGQPREPQVYTLPPSREEMTKNQVSLTCLVKGFYPSDIAVE | |
| | | WESNGQPENNYKTTPPVLDSDGSFFLYSKLTVDKSRWQQGNVFSCSVMHEALHN | |
| | | HYTQKSLSLSPGK | |
| iPS:361229 | 5C2.007 | QVPLVQSGAEVKKPGASVKVSCKASGYTFTGYYIHWVRQAPGQGLEWMGWINPE | 558 |
| | | SGGTDYSQRFQGRFTMTRDTSISTAYMELNRLRSDDTAVYYCAREATIFGMVIVPF | |
| | | DYWGQGTLVTVSSASTKGPSVFPLAPSSKSTSGGTAALGCLVKDYFPEPVTVSWN | |
| | | SGALTSGVHTFPAVLQSSGLYSLSSVVTVPSSSLGTQTYICNVNHKPSNTKVDKKV | |
| | | EPKSCDKTHTCPPCPAPELLGGPSVFLFPPKPKDTLMISRTPEVTCVVVDVSHEDPE | |
| | | VKFNWYVDGVEVHNAKTKPCEEQYGSTYRCVSVLTVLHQDWLNGKEYKCKVSN | |
| | | KALPAPIEKTISKAKGQPREPQVYTLPPSREEMTKNQVSLTCLVKGFYPSDIAVEWE | |
| | | SNGQPENNYKTTPPVLDSDGSFFLYSKLTVDKSRWQQGNVFSCSVMHEALHNHY | |
| | | TQKSLSLSPGK | |
| iPS:361236 | 5C2.008 | QVQLVQSGAEVKKPGASVKVSCKASGYTFTGYYIHWVRQAPGQGLEWMGWINP | 559 |
| | | DAGGTDYSQRFQGRVTMTRDTSISTAYMELNRLRSDDTAVYYCAREATIFGMVIV | |
| | | PFDYWGQGTLVTVSSASTKGPSVFPLAPSSKSTSGGTAALGCLVKDYFPEPVTVSW | |
| | | NSGALTSGVHTFPAVLQSSGLYSLSSVVTVPSSSLGTQTYICNVNHKPSNTKVDKK | |
| | | VEPKSCDKTHTCPPCPAPELLGGPSVFLFPPKPKDTLMISRTPEVTCVVVDVSHEDP | |
| | | EVKFNWYVDGVEVHNAKTKPCEEQYGSTYRCVSVLTVLHQDWLNGKEYKCKVS | |
| | | NKALPAPIEKTISKAKGQPREPQVYTLPPSREEMTKNQVSLTCLVKGFYPSDIAVE | |
| | | WESNGQPENNYKTTPPVLDSDGSFFLYSKLTVDKSRWQQGNVFSCSVMHEALHN | |
| | | HYTQKSLSLSPGK | |
| iPS:359685 | 5C2.009 | QVPLVQSGAEVKKPGASVKVSCKASGYTFTGYYIHWVRQAPGQGLEWMGWINP | 560 |
| | | DAGGTDYSQRFQGRFTMTRDTSISTAYMELNRLRSDDTAVYYCAREATIFGMVIV | |
| | | PFDYWGQGTLVTVSSASTKGPSVFPLAPSSKSTSGGTAALGCLVKDYFPEPVTVSW | |
| | | NSGALTSGVHTFPAVLQSSGLYSLSSVVTVPSSSLGTQTYICNVNHKPSNTKVDKK | |
| | | VEPKSCDKTHTCPPCPAPELLGGPSVFLFPPKPKDTLMISRTPEVTCVVVDVSHEDP | |
| | | EVKFNWYVDGVEVHNAKTKPCEEQYGSTYRCVSVLTVLHQDWLNGKEYKCKVS | |
| | | NKALPAPIEKTISKAKGQPREPQVYTLPPSREEMTKNQVSLTCLVKGFYPSDIAVE | |
| | | WESNGQPENNYKTTPPVLDSDGSFFLYSKLTVDKSRWQQGNVFSCSVMHEALHN | |
| | | HYTQKSLSLSPGK | |
| iPS:361240 | 5C2.010 | QVQLVQSGAEVKKPGASVKVSCKASGYTFTGYYIHWVRQAPGQGLEWMGWINP | 561 |
| | | DSGGTDYSQRFQGRVTMTRDTSISTAYMELNRLRSDDTAVYYCAREATIFGMVIV | |
| | | PFDYWGQGTLVTVSSASTKGPSVFPLAPSSKSTSGGTAALGCLVKDYFPEPVTVSW | |
| | | NSGALTSGVHTFPAVLQSSGLYSLSSVVTVPSSSLGTQTYICNVNHKPSNTKVDKK | |
| | | VEPKSCDKTHTCPPCPAPELLGGPSVFLFPPKPKDTLMISRTPEVTCVVVDVSHEDP | |
| | | EVKFNWYVDGVEVHNAKTKPCEEQYGSTYRCVSVLTVLHQDWLNGKEYKCKVS | |
| | | NKALPAPIEKTISKAKGQPREPQVYTLPPSREEMTKNQVSLTCLVKGFYPSDIAVE | |
| | | WESNGQPENNYKTTPPVLDSDGSFFLYSKLTVDKSRWQQGNVFSCSVMHEALHN | |
| | | HYTQKSLSLSPGK | |
| iPS:361247 | 5C2.011 | QVQLVQSGAEVKKPGASVKVSCKASGYTFTGYYIHWVRQAPGQGLEWMGWINP | 562 |
| | | DSGGTDYSQRFQGRFTMTRDTSISTAYMELNRLRSDDTAVYYCAREATIFGMVIVP | |
| | | FDYWGQGTLVTVSSASTKGPSVFPLAPSSKSTSGGTAALGCLVKDYFPEPVTVSW | |
| | | NSGALTSGVHTFPAVLQSSGLYSLSSVVTVPSSSLGTQTYICNVNHKPSNTKVDKK | |
| | | VEPKSCDKTHTCPPCPAPELLGGPSVFLFPPKPKDTLMISRTPEVTCVVVDVSHEDP | |
| | | EVKFNWYVDGVEVHNAKTKPCEEQYGSTYRCVSVLTVLHQDWLNGKEYKCKVS | |
| | | NKALPAPIEKTISKAKGQPREPQVYTLPPSREEMTKNQVSLTCLVKGFYPSDIAVE | |
| | | WESNGQPENNYKTTPPVLDSDGSFFLYSKLTVDKSRWQQGNVFSCSVMHEALHN | |
| | | HYTQKSLSLSPGK | |
| iPS:361254 | 5C2.012 | QVPLVQSGAEVKKPGASVKVSCKASGYTFTGYYIHWVRQAPGQGLEWMGWINP | 563 |
| | | DSGGTDYSQRFQGRVTMTRDTSISTAYMELNRLRSDDTAVYYCAREATIFGMVIV | |
| | | PFDYWGQGTLVTVSSASTKGPSVFPLAPSSKSTSGGTAALGCLVKDYFPEPVTVSW | |
| | | NSGALTSGVHTFPAVLQSSGLYSLSSVVTVPSSSLGTQTYICNVNHKPSNTKVDKK | |
| | | VEPKSCDKTHTCPPCPAPELLGGPSVFLFPPKPKDTLMISRTPEVTCVVVDVSHEDP | |
| | | EVKFNWYVDGVEVHNAKTKPCEEQYGSTYRCVSVLTVLHQDWLNGKEYKCKVS | |
| | | NKALPAPIEKTISKAKGQPREPQVYTLPPSREEMTKNQVSLTCLVKGFYPSDIAVE | |
| | | WESNGQPENNYKTTPPVLDSDGSFFLYSKLTVDKSRWQQGNVFSCSVMHEALHN | |
| | | HYTQKSLSLSPGK | |
| iPS:361261 | 5C2.013 | QVQLVQSGAEVKKPGASVKVSCKASGYTFTGYYIHWVRQAPGQGLEWMGWINP | 564 |
| | | DAGGTDYSQRFQGRFTMTRDTSISTAYMELNRLRSDDTAVYYCAREATIFGMVIV | |
| | | PFDYWGQGTLVTVSSASTKGPSVFPLAPSSKSTSGGTAALGCLVKDYFPEPVTVSW | |
| | | NSGALTSGVHTFPAVLQSSGLYSLSSVVTVPSSSLGTQTYICNVNHKPSNTKVDKK | |
| | | VEPKSCDKTHTCPPCPAPELLGGPSVFLFPPKPKDTLMISRTPEVTCVVVDVSHEDP | |
| | | EVKFNWYVDGVEVHNAKTKPCEEQYGSTYRCVSVLTVLHQDWLNGKEYKCKVS | |
| | | NKALPAPIEKTISKAKGQPREPQVYTLPPSREEMTKNQVSLTCLVKGFYPSDIAVE | |
| | | WESNGQPENNYKTTPPVLDSDGSFFLYSKLTVDKSRWQQGNVFSCSVMHEALHN | |
| | | HYTQKSLSLSPGK | |
| iPS:361268 | 5C2.014 | QVPLVQSGAEVKKPGASVKVSCKASGYTFTGYYIHWVRQAPGQGLEWMGWINP | 565 |
| | | DAGGTDYSQRFQGRVTMTRDTSISTAYMELNRLRSDDTAVYYCAREATIFGMVIV | |
| | | PFDYWGQGTLVTVSSASTKGPSVFPLAPSSKSTSGGTAALGCLVKDYFPEPVTVSW | |
| | | NSGALTSGVHTFPAVLQSSGLYSLSSVVTVPSSSLGTQTYICNVNHKPSNTKVDKK | |
| | | VEPKSCDKTHTCPPCPAPELLGGPSVFLFPPKPKDTLMISRTPEVTCVVVDVSHEDP | |
| | | EVKFNWYVDGVEVHNAKTKPCEEQYGSTYRCVSVLTVLHQDWLNGKEYKCKVS | |
| | | NKALPAPIEKTISKAKGQPREPQVYTLPPSREEMTKNQVSLTCLVKGFYPSDIAVE | |
| | | WESNGQPENNYKTTPPVLDSDGSFFLYSKLTVDKSRWQQGNVFSCSVMHEALHN | |
| | | HYTQKSLSLSPGK | |
| iPS:359669 | 5C2.015 | QVQLVQSGAEVKKPGASVKVSCKASGYTFTGYYIHWVRQAPGQGLEWMGWINP | 566 |
| | | DAGGTDYSQRFQGRVTMTRDTSISTAYMELNSLRSDDTAVYYCAREATIFGMVIV | |
| | | PFDYWGQGTLVTVSSASTKGPSVFPLAPSSKSTSGGTAALGCLVKDYFPEPVTVSW | |
| | | NSGALTSGVHTFPAVLQSSGLYSLSSVVTVPSSSLGTQTYICNVNHKPSNTKVDKK | |
| | | VEPKSCDKTHTCPPCPAPELLGGPSVFLFPPKPKDTLMISRTPEVTCVVVDVSHEDP | |
| | | EVKFNWYVDGVEVHNAKTKPCEEQYGSTYRCVSVLTVLHQDWLNGKEYKCKVS | |
| | | NKALPAPIEKTISKAKGQPREPQVYTLPPSREEMTKNQVSLTCLVKGFYPSDIAVE | |
| | | WESNGQPENNYKTTPPVLDSDGSFFLYSKLTVDKSRWQQGNVFSCSVMHEALHN | |
| | | HYTQKSLSLSPGK | |
| iPS:359678 | 5C2.016 | QVQLVQSGAEVKKPGASVKVSCKASGYTFTGYYIHWVRQAPGQGLEWMGWINP | 567 |
| | | ESGGTDYSQRFQGRVTMTRDTSISTAYMELNSLRSDDTAVYYCAREATIFGMVIVP | |
| | | FDYWGQGTLVTVSSASTKGPSVFPLAPSSKSTSGGTAALGCLVKDYFPEPVTVSW | |
| | | NSGALTSGVHTFPAVLQSSGLYSLSSVVTVPSSSLGTQTYICNVNHKPSNTKVDKK | |
| | | VEPKSCDKTHTCPPCPAPELLGGPSVFLFPPKPKDTLMISRTPEVTCVVVDVSHEDP | |
| | | EVKFNWYVDGVEVHNAKTKPCEEQYGSTYRCVSVLTVLHQDWLNGKEYKCKVS | |
| | | NKALPAPIEKTISKAKGQPREPQVYTLPPSREEMTKNQVSLTCLVKGFYPSDIAVE | |
| | | WESNGQPENNYKTTPPVLDSDGSFFLYSKLTVDKSRWQQGNVFSCSVMHEALHN | |
| | | HYTQKSLSLSPGK | |
| iPS:361275 | 11C1.002 | QVPLVQSGAEVKKPGASVKVSCKASGYTFTGYYIHWVRQAPGQGLVWMGWISP | 568 |
| | | NSGETSYAQKFQDRVTMTRDTSISTAYMELSRLRSDDTAVYFCAREATIFGMLIVP | |
| | | FDYWGQGTLVTVSSASTKGPSVFPLAPSSKSTSGGTAALGCLVKDYFPEPVTVSW | |
| | | NSGALTSGVHTFPAVLQSSGLYSLSSVVTVPSSSLGTQTYICNVNHKPSNTKVDKK | |
| | | VEPKSCDKTHTCPPCPAPELLGGPSVFLFPPKPKDTLMISRTPEVTCVVVDVSHEDP | |
| | | EVKFNWYVDGVEVHNAKTKPCEEQYGSTYRCVSVLTVLHQDWLNGKEYKCKVS | |
| | | NKALPAPIEKTISKAKGQPREPQVYTLPPSREEMTKNQVSLTCLVKGFYPSDIAVE | |
| | | WESNGQPENNYKTTPPVLDSDGSFFLYSKLTVDKSRWQQGNVFSCSVMHEALHN | |
| | | HYTQKSLSLSPGK | |
| iPS:361282 | 11C1.003 | QVPLVQSGAEVKKPGASVKVSCKASGYTFTGYYIHWVRQAPGQGLVWMGWISP | 569 |
| | | NSGDTSYAQKFQDRVTMTRDTSISTAYMELSRLRSDDTAVYFCAREATIFGMLIVP | |
| | | FDYWGQGTLVTVSSASTKGPSVFPLAPSSKSTSGGTAALGCLVKDYFPEPVTVSW | |
| | | NSGALTSGVHTFPAVLQSSGLYSLSSVVTVPSSSLGTQTYICNVNHKPSNTKVDKK | |
| | | VEPKSCDKTHTCPPCPAPELLGGPSVFLFPPKPKDTLMISRTPEVTCVVVDVSHEDP | |
| | | EVKFNWYVDGVEVHNAKTKPCEEQYGSTYRCVSVLTVLHQDWLNGKEYKCKVS | |
| | | NKALPAPIEKTISKAKGQPREPQVYTLPPSREEMTKNQVSLTCLVKGFYPSDIAVE | |
| | | WESNGQPENNYKTTPPVLDSDGSFFLYSKLTVDKSRWQQGNVFSCSVMHEALHN | |
| | | HYTQKSLSLSPGK | |
| iPS:361289 | 11C1.004 | QVPLVQSGAEVKKPGASVKVSCKASGYTFTGYYIHWVRQAPGQGLVWMGWISP | 570 |
| | | NSGETSYAQKFQDRVTMTRDTSISTAYMELSRLRSDDTAVYFCAREATIFGMLIVP | |
| | | FDYWGQGTLVTVSSASTKGPSVFPLAPSSKSTSGGTAALGCLVKDYFPEPVTVSW | |
| | | NSGALTSGVHTFPAVLQSSGLYSLSSVVTVPSSSLGTQTYICNVNHKPSNTKVDKK | |
| | | VEPKSCDKTHTCPPCPAPELLGGPSVFLFPPKPKDTLMISRTPEVTCVVVDVSHEDP | |
| | | EVKFNWYVDGVEVHNAKTKPCEEQYGSTYRCVSVLTVLHQDWLNGKEYKCKVS | |
| | | NKALPAPIEKTISKAKGQPREPQVYTLPPSREEMTKNQVSLTCLVKGFYPSDIAVE | |
| | | WESNGQPENNYKTTPPVLDSDGSFFLYSKLTVDKSRWQQGNVFSCSVMHEALHN | |
| | | HYTQKSLSLSPGK | |
| iPS:359712 | 11C1.005 | QVPLVQSGAEVKKPGASVKVSCKASGYTFTGYYIHWVRQAPGQGLVWMGWISP | 571 |
| | | NSGETSYAQKFQDRVTMTRDTSISTAYMELSRLRSDDTAVYFCTREATIFGMLIVP | |
| | | FDYWGQGTLVTVSSASTKGPSVFPLAPSSKSTSGGTAALGCLVKDYFPEPVTVSW | |
| | | NSGALTSGVHTFPAVLQSSGLYSLSSVVTVPSSSLGTQTYICNVNHKPSNTKVDKK | |
| | | VEPKSCDKTHTCPPCPAPELLGGPSVFLFPPKPKDTLMISRTPEVTCVVVDVSHEDP | |
| | | EVKFNWYVDGVEVHNAKTKPCEEQYGSTYRCVSVLTVLHQDWLNGKEYKCKVS | |
| | | NKALPAPIEKTISKAKGQPREPQVYTLPPSREEMTKNQVSLTCLVKGFYPSDIAVE | |
| | | WESNGQPENNYKTTPPVLDSDGSFFLYSKLTVDKSRWQQGNVFSCSVMHEALHN | |
| | | HYTQKSLSLSPGK | |
| iPS:361293 | 11C1.006 | QVPLVQSGAEVKKPGASVKVSCKASGYTFTGYYIHWVRQAPGQGLVWMGWISP | 572 |
| | | NSGDTSYAQKFQDRVTMTRDTSISTAYMELSRLRSDDTAVYFCTREATIFGMLIVP | |
| | | FDYWGQGTLVTVSSASTKGPSVFPLAPSSKSTSGGTAALGCLVKDYFPEPVTVSW | |
| | | NSGALTSGVHTFPAVLQSSGLYSLSSVVTVPSSSLGTQTYICNVNHKPSNTKVDKK | |
| | | VEPKSCDKTHTCPPCPAPELLGGPSVFLFPPKPKDTLMISRTPEVTCVVVDVSHEDP | |
| | | EVKFNWYVDGVEVHNAKTKPCEEQYGSTYRCVSVLTVLHQDWLNGKEYKCKVS | |
| | | NKALPAPIEKTISKAKGQPREPQVYTLPPSREEMTKNQVSLTCLVKGFYPSDIAVE | |
| | | WESNGQPENNYKTTPPVLDSDGSFFLYSKLTVDKSRWQQGNVFSCSVMHEALHN | |
| | | HYTQKSLSLSPGK | |
| iPS:361297 | 11C1.007 | QVPLVQSGAEVKKPGASVKVSCKASGYTFTGYYIHWVRQAPGQGLVWMGWISP | 573 |
| | | NSGETSYAQKFQDRVTMTRDTSISTAYMELSRLRSDDTAVYFCTREATIFGMLIVP | |
| | | FDYWGQGTLVTVSSASTKGPSVFPLAPSSKSTSGGTAALGCLVKDYFPEPVTVSW | |
| | | NSGALTSGVHTFPAVLQSSGLYSLSSVVTVPSSSLGTQTYICNVNHKPSNTKVDKK | |
| | | VEPKSCDKTHTCPPCPAPELLGGPSVFLFPPKPKDTLMISRTPEVTCVVVDVSHEDP | |
| | | EVKFNWYVDGVEVHNAKTKPCEEQYGSTYRCVSVLTVLHQDWLNGKEYKCKVS | |
| | | NKALPAPIEKTISKAKGQPREPQVYTLPPSREEMTKNQVSLTCLVKGFYPSDIAVE | |
| | | WESNGQPENNYKTTPPVLDSDGSFFLYSKLTVDKSRWQQGNVFSCSVMHEALHN | |
| | | HYTQKSLSLSPGK | |
| iPS:361301 | 11C1.008 | QVPLVQSGAEVKKPGASVKVSCKASGYTFTGYYIHWVRQAPGQGLVWMGWISP | 574 |
| | | NSGDTSYAQKFQDRVTMTRDTSISTAYMELSRLRSDDTAVYFCAREATIFGMLIVP | |
| | | FDYWGQGTLVTVSSASTKGPSVFPLAPSSKSTSGGTAALGCLVKDYFPEPVTVSW | |
| | | NSGALTSGVHTFPAVLQSSGLYSLSSVVTVPSSSLGTQTYICNVNHKPSNTKVDKK | |
| | | VEPKSCDKTHTCPPCPAPELLGGPSVFLFPPKPKDTLMISRTPEVTCVVVDVSHEDP | |
| | | EVKFNWYVDGVEVHNAKTKPCEEQYGSTYRCVSVLTVLHQDWLNGKEYKCKVS | |
| | | NKALPAPIEKTISKAKGQPREPQVYTLPPSREEMTKNQVSLTCLVKGFYPSDIAVE | |
| | | WESNGQPENNYKTTPPVLDSDGSFFLYSKLTVDKSRWQQGNVFSCSVMHEALHN | |
| | | HYTQKSLSLSPGK | |
| iPS:359703 | 11C1.009 | QVQLVQSGAEVKKPGASVKVSCKASGYTFTGYYIHWVRQAPGQGLEWMGWISP | 575 |
| | | NSGETSYAQKFQDRVTMTRDTSISTAYMELSSLRSDDTAVYFCAREATIFGMLIVP | |
| | | FDYWGQGTLVTVSSASTKGPSVFPLAPSSKSTSGGTAALGCLVKDYFPEPVTVSW | |
| | | NSGALTSGVHTFPAVLQSSGLYSLSSVVTVPSSSLGTQTYICNVNHKPSNTKVDKK | |
| | | VEPKSCDKTHTCPPCPAPELLGGPSVFLFPPKPKDTLMISRTPEVTCVVVDVSHEDP | |
| | | EVKFNWYVDGVEVHNAKTKPCEEQYGSTYRCVSVLTVLHQDWLNGKEYKCKVS | |
| | | NKALPAPIEKTISKAKGQPREPQVYTLPPSREEMTKNQVSLTCLVKGFYPSDIAVE | |
| | | WESNGQPENNYKTTPPVLDSDGSFFLYSKLTVDKSRWQQGNVFSCSVMHEALHN | |
| | | HYTQKSLSLSPGK | |
| iPS:361305 | 11C1.010 | QVQLVQSGAEVKKPGASVKVSCKASGYTFTGYYIHWVRQAPGQGLEWMGWISP | 576 |
| | | NSGETSYAQKFQDRVTMTRDTSISTAYMELSRLRSDDTAVYFCAREATIFGMLIVP | |
| | | FDYWGQGTLVTVSSASTKGPSVFPLAPSSKSTSGGTAALGCLVKDYFPEPVTVSW | |
| | | NSGALTSGVHTFPAVLQSSGLYSLSSVVTVPSSSLGTQTYICNVNHKPSNTKVDKK | |
| | | VEPKSCDKTHTCPPCPAPELLGGPSVFLFPPKPKDTLMISRTPEVTCVVVDVSHEDP | |
| | | EVKFNWYVDGVEVHNAKTKPCEEQYGSTYRCVSVLTVLHQDWLNGKEYKCKVS | |
| | | NKALPAPIEKTISKAKGQPREPQVYTLPPSREEMTKNQVSLTCLVKGFYPSDIAVE | |
| | | WESNGQPENNYKTTPPVLDSDGSFFLYSKLTVDKSRWQQGNVFSCSVMHEALHN | |
| | | HYTQKSLSLSPGK | |
| iPS:361312 | 13H12.002 | QVPLVQSGAEVKKPGASVKVSCKASGYTFTGYYIHWVRQAPGQGLEWMGWINPE | 577 |
| | | SGGTDYSQRFQGRVTMTRDTSISTAYMELSRLRSDDTAVYYCAREATIFGMVIVPF | |
| | | DYWGQGTLVTVSSASTKGPSVFPLAPSSKSTSGGTAALGCLVKDYFPEPVTVSWN | |
| | | SGALTSGVHTFPAVLQSSGLYSLSSVVTVPSSSLGTQTYICNVNHKPSNTKVDKKV | |
| | | EPKSCDKTHTCPPCPAPELLGGPSVFLFPPKPKDTLMISRTPEVTCVVVDVSHEDPE | |
| | | VKFNWYVDGVEVHNAKTKPCEEQYGSTYRCVSVLTVLHQDWLNGKEYKCKVSN | |
| | | KALPAPIEKTISKAKGQPREPQVYTLPPSREEMTKNQVSLTCLVKGFYPSDIAVEWE | |
| | | SNGQPENNYKTTPPVLDSDGSFFLYSKLTVDKSRWQQGNVFSCSVMHEALHNHY | |
| | | TQKSLSLSPGK | |
| iPS:359744 | 13H12.003 | QVPLVQSGAEVKKPGASVKVSCKASGYTFTGYYIHWVRQAPGQGLEWMGWINPE | 578 |
| | | SGGTDYSQRFQGRFTMTRDTSISTAYMELSRLRSDDTAVYYCAREATIFGMVIVPF | |
| | | DYWGQGTLVTVSSASTKGPSVFPLAPSSKSTSGGTAALGCLVKDYFPEPVTVSWN | |
| | | SGALTSGVHTFPAVLQSSGLYSLSSVVTVPSSSLGTQTYICNVNHKPSNTKVDKKV | |
| | | EPKSCDKTHTCPPCPAPELLGGPSVFLFPPKPKDTLMISRTPEVTCVVVDVSHEDPE | |
| | | VKFNWYVDGVEVHNAKTKPCEEQYGSTYRCVSVLTVLHQDWLNGKEYKCKVSN | |
| | | KALPAPIEKTISKAKGQPREPQVYTLPPSREEMTKNQVSLTCLVKGFYPSDIAVEWE | |
| | | SNGQPENNYKTTPPVLDSDGSFFLYSKLTVDKSRWQQGNVFSCSVMHEALHNHY | |
| | | TQKSLSLSPGK | |
| iPS:361319 | 13H12.004 | QVPLVQSGAEVKKPGASVKVSCKASGYTFTGYYIHWVRQAPGQGLEWMGWINP | 579 |
| | | DSGGTDYSQRFQGRVTMTRDTSISTAYMELSRLRSDDTAVYYCAREATIFGMVIVP | |
| | | FDYWGQGTLVTVSSASTKGPSVFPLAPSSKSTSGGTAALGCLVKDYFPEPVTVSW | |
| | | NSGALTSGVHTFPAVLQSSGLYSLSSVVTVPSSSLGTQTYICNVNHKPSNTKVDKK | |
| | | VEPKSCDKTHTCPPCPAPELLGGPSVFLFPPKPKDTLMISRTPEVTCVVVDVSHEDP | |
| | | EVKFNWYVDGVEVHNAKTKPCEEQYGSTYRCVSVLTVLHQDWLNGKEYKCKVS | |
| | | NKALPAPIEKTISKAKGQPREPQVYTLPPSREEMTKNQVSLTCLVKGFYPSDIAVE | |
| | | WESNGQPENNYKTTPPVLDSDGSFFLYSKLTVDKSRWQQGNVFSCSVMHEALHN | |
| | | HYTQKSLSLSPGK | |
| iPS:359737 | 13H12.005 | QVQLVQSGAEVKKPGASVKVSCKASGYTFTGYYIHWVRQAPGQGLEWMGWINP | 580 |
| | | ESGGTDYSQRFQGRVTMTRDTSISTAYMELSSLRSDDTAVYYCAREATIFGMVIVP | |
| | | FDYWGQGTLVTVSSASTKGPSVFPLAPSSKSTSGGTAALGCLVKDYFPEPVTVSW | |
| | | NSGALTSGVHTFPAVLQSSGLYSLSSVVTVPSSSLGTQTYICNVNHKPSNTKVDKK | |
| | | VEPKSCDKTHTCPPCPAPELLGGPSVFLFPPKPKDTLMISRTPEVTCVVVDVSHEDP | |
| | | EVKFNWYVDGVEVHNAKTKPCEEQYGSTYRCVSVLTVLHQDWLNGKEYKCKVS | |
| | | NKALPAPIEKTISKAKGQPREPQVYTLPPSREEMTKNQVSLTCLVKGFYPSDIAVE | |
| | | WESNGQPENNYKTTPPVLDSDGSFFLYSKLTVDKSRWQQGNVFSCSVMHEALHN | |
| | | HYTQKSLSLSPGK | |
| iPS:361326 | 13H12.006 | QVPLVQSGAEVKKPGASVKVSCKASGYTFTGYYIHWVRQAPGQGLEWMGWINPE | 581 |
| | | SGGTDYSQRFQGRVTMTRDTSISTAYMELSRLRSDDTAVYYCAREATIFGMVIVPF | |
| | | DYWGQGTLVTVSSASTKGPSVFPLAPSSKSTSGGTAALGCLVKDYFPEPVTVSWN | |
| | | SGALTSGVHTFPAVLQSSGLYSLSSVVTVPSSSLGTQTYICNVNHKPSNTKVDKKV | |
| | | EPKSCDKTHTCPPCPAPELLGGPSVFLFPPKPKDTLMISRTPEVTCVVVDVSHEDPE | |
| | | VKFNWYVDGVEVHNAKTKPCEEQYGSTYRCVSVLTVLHQDWLNGKEYKCKVSN | |
| | | KALPAPIEKTISKAKGQPREPQVYTLPPSREEMTKNQVSLTCLVKGFYPSDIAVEWE | |
| | | SNGQPENNYKTTPPVLDSDGSFFLYSKLTVDKSRWQQGNVFSCSVMHEALHNHY | |
| | | TQKSLSLSPGK | |
| iPS:361330 | 12H11.002 | QVPLVQSGAEVKKPGASVKVSCKASGYTFTGYYIHWVRQAPGQGLEWMGWISPN | 582 |
| | | QGETNYAQKFQDRVTMTRDTSISTAYMELSRLRSDDTAVYYCAREATIFGMLIVPF | |
| | | DYWGQGTLVTVSSASTKGPSVFPLAPSSKSTSGGTAALGCLVKDYFPEPVTVSWN | |
| | | SGALTSGVHTFPAVLQSSGLYSLSSVVTVPSSSLGTQTYICNVNHKPSNTKVDKKV | |
| | | EPKSCDKTHTCPPCPAPELLGGPSVFLFPPKPKDTLMISRTPEVTCVVVDVSHEDPE | |
| | | VKFNWYVDGVEVHNAKTKPCEEQYGSTYRCVSVLTVLHQDWLNGKEYKCKVSN | |
| | | KALPAPIEKTISKAKGQPREPQVYTLPPSREEMTKNQVSLTCLVKGFYPSDIAVEWE | |
| | | SNGQPENNYKTTPPVLDSDGSFFLYSKLTVDKSRWQQGNVFSCSVMHEALHNHY | |
| | | TQKSLSLSPGK | |
| iPS:361337 | 12H11.003 | QVPLVQSGAEVKKPGASVKVSCKASGYTFTGYYIHWVRQAPGQGLEWMGWISPN | 583 |
| | | QGDTNYAQKFQDRVTMTRDTSISTAYMELSRLRSDDTAVYYCAREATIFGMLIVP | |
| | | FDYWGQGTLVTVSSASTKGPSVFPLAPSSKSTSGGTAALGCLVKDYFPEPVTVSW | |
| | | NSGALTSGVHTFPAVLQSSGLYSLSSVVTVPSSSLGTQTYICNVNHKPSNTKVDKK | |
| | | VEPKSCDKTHTCPPCPAPELLGGPSVFLFPPKPKDTLMISRTPEVTCVVVDVSHEDP | |
| | | EVKFNWYVDGVEVHNAKTKPCEEQYGSTYRCVSVLTVLHQDWLNGKEYKCKVS | |
| | | NKALPAPIEKTISKAKGQPREPQVYTLPPSREEMTKNQVSLTCLVKGFYPSDIAVE | |
| | | WESNGQPENNYKTTPPVLDSDGSFFLYSKLTVDKSRWQQGNVFSCSVMHEALHN | |
| | | HYTQKSLSLSPGK | |
| iPS:361344 | 12H11.004 | QVPLVQSGAEVKKPGASVKVSCKASGYTFTGYYIHWVRQAPGQGLEWMGWISPN | 584 |
| | | QGETNYAQKFQDRVTMTRDTSISTAYMELSRLRSDDTAVYYCTREATIFGMLIVPF | |
| | | DYWGQGTLVTVSSASTKGPSVFPLAPSSKSTSGGTAALGCLVKDYFPEPVTVSWN | |
| | | SGALTSGVHTFPAVLQSSGLYSLSSVVTVPSSSLGTQTYICNVNHKPSNTKVDKKV | |
| | | EPKSCDKTHTCPPCPAPELLGGPSVFLFPPKPKDTLMISRTPEVTCVVVDVSHEDPE | |
| | | VKFNWYVDGVEVHNAKTKPCEEQYGSTYRCVSVLTVLHQDWLNGKEYKCKVSN | |
| | | KALPAPIEKTISKAKGQPREPQVYTLPPSREEMTKNQVSLTCLVKGFYPSDIAVEWE | |
| | | SNGQPENNYKTTPPVLDSDGSFFLYSKLTVDKSRWQQGNVFSCSVMHEALHNHY | |
| | | TQKSLSLSPGK | |
| iPS:361351 | 12H11.005 | QVPLVQSGAEVKKPGASVKVSCKASGYTFTGYYIHWVRQAPGQGLEWMGWISPN | 585 |
| | | NGETNYAQKFQDRVTMTRDTSISTAYMELSRLRSDDTAVYYCAREATIFGMLIVPF | |
| | | DYWGQGTLVTVSSASTKGPSVFPLAPSSKSTSGGTAALGCLVKDYFPEPVTVSWN | |
| | | SGALTSGVHTFPAVLQSSGLYSLSSVVTVPSSSLGTQTYICNVNHKPSNTKVDKKV | |
| | | EPKSCDKTHTCPPCPAPELLGGPSVFLFPPKPKDTLMISRTPEVTCVVVDVSHEDPE | |
| | | VKFNWYVDGVEVHNAKTKPCEEQYGSTYRCVSVLTVLHQDWLNGKEYKCKVSN | |
| | | KALPAPIEKTISKAKGQPREPQVYTLPPSREEMTKNQVSLTCLVKGFYPSDIAVEWE | |
| | | SNGQPENNYKTTPPVLDSDGSFFLYSKLTVDKSRWQQGNVFSCSVMHEALHNHY | |
| | | TQKSLSLSPGK | |
| iPS:361358 | 12H11.006 | QVPLVQSGAEVKKPGASVKVSCKASGYTFTGYYIHWVRQAPGQGLEWMGWISPN | 586 |
| | | NGDTNYAQKFQDRVTMTRDTSISTAYMELSRLRSDDTAVYYCAREATIFGMLIVP | |
| | | FDYWGQGTLVTVSSASTKGPSVFPLAPSSKSTSGGTAALGCLVKDYFPEPVTVSW | |
| | | NSGALTSGVHTFPAVLQSSGLYSLSSVVTVPSSSLGTQTYICNVNHKPSNTKVDKK | |
| | | VEPKSCDKTHTCPPCPAPELLGGPSVFLFPPKPKDTLMISRTPEVTCVVVDVSHEDP | |
| | | EVKFNWYVDGVEVHNAKTKPCEEQYGSTYRCVSVLTVLHQDWLNGKEYKCKVS | |
| | | NKALPAPIEKTISKAKGQPREPQVYTLPPSREEMTKNQVSLTCLVKGFYPSDIAVE | |
| | | WESNGQPENNYKTTPPVLDSDGSFFLYSKLTVDKSRWQQGNVFSCSVMHEALHN | |
| | | HYTQKSLSLSPGK | |
| iPS:361365 | 12H11.007 | QVPLVQSGAEVKKPGASVKVSCKASGYTFTGYYIHWVRQAPGQGLEWMGWISPN | 587 |
| | | QGDTNYAQKFQDRVTMTRDTSISTAYMELSRLRSDDTAVYYCTREATIFGMLIVPF | |
| | | DYWGQGTLVTVSSASTKGPSVFPLAPSSKSTSGGTAALGCLVKDYFPEPVTVSWN | |
| | | SGALTSGVHTFPAVLQSSGLYSLSSVVTVPSSSLGTQTYICNVNHKPSNTKVDKKV | |
| | | EPKSCDKTHTCPPCPAPELLGGPSVFLFPPKPKDTLMISRTPEVTCVVVDVSHEDPE | |
| | | VKFNWYVDGVEVHNAKTKPCEEQYGSTYRCVSVLTVLHQDWLNGKEYKCKVSN | |
| | | KALPAPIEKTISKAKGQPREPQVYTLPPSREEMTKNQVSLTCLVKGFYPSDIAVEWE | |
| | | SNGQPENNYKTTPPVLDSDGSFFLYSKLTVDKSRWQQGNVFSCSVMHEALHNHY | |
| | | TQKSLSLSPGK | |
| iPS:361372 | 12H11.008 | QVPLVQSGAEVKKPGASVKVSCKASGYTFTGYYIHWVRQAPGQGLEWMGWISPN | 588 |
| | | NGETNYAQKFQDRVTMTRDTSISTAYMELSRLRSDDTAVYYCTREATIFGMLIVPF | |
| | | DYWGQGTLVTVSSASTKGPSVFPLAPSSKSTSGGTAALGCLVKDYFPEPVTVSWN | |
| | | SGALTSGVHTFPAVLQSSGLYSLSSVVTVPSSSLGTQTYICNVNHKPSNTKVDKKV | |
| | | EPKSCDKTHTCPPCPAPELLGGPSVFLFPPKPKDTLMISRTPEVTCVVVDVSHEDPE | |
| | | VKFNWYVDGVEVHNAKTKPCEEQYGSTYRCVSVLTVLHQDWLNGKEYKCKVSN | |
| | | KALPAPIEKTISKAKGQPREPQVYTLPPSREEMTKNQVSLTCLVKGFYPSDIAVEWE | |
| | | SNGQPENNYKTTPPVLDSDGSFFLYSKLTVDKSRWQQGNVFSCSVMHEALHNHY | |
| | | TQKSLSLSPGK | |
| iPS:361379 | 12H11.009 | QVPLVQSGAEVKKPGASVKVSCKASGYTFTGYYIHWVRQAPGQGLEWMGWISPN | 589 |
| | | QGETNYAQKFQDRVTMTRDTSISTAYMELSRLRSDDTAVYYCAREATIFGMLIVPF | |
| | | DYWGQGTLVTVSSASTKGPSVFPLAPSSKSTSGGTAALGCLVKDYFPEPVTVSWN | |
| | | SGALTSGVHTFPAVLQSSGLYSLSSVVTVPSSSLGTQTYICNVNHKPSNTKVDKKV | |
| | | EPKSCDKTHTCPPCPAPELLGGPSVFLFPPKPKDTLMISRTPEVTCVVVDVSHEDPE | |
| | | VKFNWYVDGVEVHNAKTKPCEEQYGSTYRCVSVLTVLHQDWLNGKEYKCKVSN | |
| | | KALPAPIEKTISKAKGQPREPQVYTLPPSREEMTKNQVSLTCLVKGFYPSDIAVEWE | |
| | | SNGQPENNYKTTPPVLDSDGSFFLYSKLTVDKSRWQQGNVFSCSVMHEALHNHY | |
| | | TQKSLSLSPGK | |
| iPS:361383 | 12H11.010 | QVPLVQSGAEVKKPGASVKVSCKASGYTFTGYYIHWVRQAPGQGLEWMGWISPN | 590 |
| | | NGDTNYAQKFQDRVTMTRDTSISTAYMELSRLRSDDTAVYYCAREATIFGMLIVP | |
| | | FDYWGQGTLVTVSSASTKGPSVFPLAPSSKSTSGGTAALGCLVKDYFPEPVTVSW | |
| | | NSGALTSGVHTFPAVLQSSGLYSLSSVVTVPSSSLGTQTYICNVNHKPSNTKVDKK | |
| | | VEPKSCDKTHTCPPCPAPELLGGPSVFLFPPKPKDTLMISRTPEVTCVVVDVSHEDP | |
| | | EVKFNWYVDGVEVHNAKTKPCEEQYGSTYRCVSVLTVLHQDWLNGKEYKCKVS | |
| | | NKALPAPIEKTISKAKGQPREPQVYTLPPSREEMTKNQVSLTCLVKGFYPSDIAVE | |
| | | WESNGQPENNYKTTPPVLDSDGSFFLYSKLTVDKSRWQQGNVFSCSVMHEALHN | |
| | | HYTQKSLSLSPGK | |
| iPS:361387 | 12H11.011 | QVPLVQSGAEVKKPGASVKVSCKASGYTFTGYYIHWVRQAPGQGLEWMGWISPN | 591 |
| | | QGDTNYAQKFQDRVTMTRDTSISTAYMELSRLRSDDTAVYYCAREATIFGMLIVP | |
| | | FDYWGQGTLVTVSSASTKGPSVFPLAPSSKSTSGGTAALGCLVKDYFPEPVTVSW | |
| | | NSGALTSGVHTFPAVLQSSGLYSLSSVVTVPSSSLGTQTYICNVNHKPSNTKVDKK | |
| | | VEPKSCDKTHTCPPCPAPELLGGPSVFLFPPKPKDTLMISRTPEVTCVVVDVSHEDP | |
| | | EVKFNWYVDGVEVHNAKTKPCEEQYGSTYRCVSVLTVLHQDWLNGKEYKCKVS | |
| | | NKALPAPIEKTISKAKGQPREPQVYTLPPSREEMTKNQVSLTCLVKGFYPSDIAVE | |
| | | WESNGQPENNYKTTPPVLDSDGSFFLYSKLTVDKSRWQQGNVFSCSVMHEALHN | |
| | | HYTQKSLSLSPGK | |
| iPS:361391 | 12H11.012 | QVPLVQSGAEVKKPGASVKVSCKASGYTFTGYYIHWVRQAPGQGLEWMGWISPN | 592 |
| | | NGETNYAQKFQDRVTMTRDTSISTAYMELSRLRSDDTAVYYCAREATIFGMLIVPF | |
| | | DYWGQGTLVTVSSASTKGPSVFPLAPSSKSTSGGTAALGCLVKDYFPEPVTVSWN | |
| | | SGALTSGVHTFPAVLQSSGLYSLSSVVTVPSSSLGTQTYICNVNHKPSNTKVDKKV | |
| | | EPKSCDKTHTCPPCPAPELLGGPSVFLFPPKPKDTLMISRTPEVTCVVVDVSHEDPE | |
| | | VKFNWYVDGVEVHNAKTKPCEEQYGSTYRCVSVLTVLHQDWLNGKEYKCKVSN | |
| | | KALPAPIEKTISKAKGQPREPQVYTLPPSREEMTKNQVSLTCLVKGFYPSDIAVEWE | |
| | | SNGQPENNYKTTPPVLDSDGSFFLYSKLTVDKSRWQQGNVFSCSVMHEALHNHY | |
| | | TQKSLSLSPGK | |
| iPS:361395 | 12H11.013 | QVQLVQSGAEVKKPGASVKVSCKASGYTFTGYYIHWVRQAPGQGLEWMGWISP | 593 |
| | | NQGETNYAQKFQDRVTMTRDTSISTAYMELSSLRSDDTAVYYCAREATIFGMLIV | |
| | | PFDYWGQGTLVTVSSASTKGPSVFPLAPSSKSTSGGTAALGCLVKDYFPEPVTVSW | |
| | | NSGALTSGVHTFPAVLQSSGLYSLSSVVTVPSSSLGTQTYICNVNHKPSNTKVDKK | |
| | | VEPKSCDKTHTCPPCPAPELLGGPSVFLFPPKPKDTLMISRTPEVTCVVVDVSHEDP | |
| | | EVKFNWYVDGVEVHNAKTKPCEEQYGSTYRCVSVLTVLHQDWLNGKEYKCKVS | |
| | | NKALPAPIEKTISKAKGQPREPQVYTLPPSREEMTKNQVSLTCLVKGFYPSDIAVE | |
| | | WESNGQPENNYKTTPPVLDSDGSFFLYSKLTVDKSRWQQGNVFSCSVMHEALHN | |
| | | HYTQKSLSLSPGK | |
| iPS:361402 | 12H11.014 | QVQLVQSGAEVKKPGASVKVSCKASGYTFTGYYIHWVRQAPGQGLEWMGWISP | 594 |
| | | NQGETNYAQKFQDRVTMTRDTSISTAYMELSSLRSDDTAVYYCAREATIFGMLIV | |
| | | PFDYWGQGTLVTVSSASTKGPSVFPLAPSSKSTSGGTAALGCLVKDYFPEPVTVSW | |
| | | NSGALTSGVHTFPAVLQSSGLYSLSSVVTVPSSSLGTQTYICNVNHKPSNTKVDKK | |
| | | VEPKSCDKTHTCPPCPAPELLGGPSVFLFPPKPKDTLMISRTPEVTCVVVDVSHEDP | |
| | | EVKFNWYVDGVEVHNAKTKPCEEQYGSTYRCVSVLTVLHQDWLNGKEYKCKVS | |
| | | NKALPAPIEKTISKAKGQPREPQVYTLPPSREEMTKNQVSLTCLVKGFYPSDIAVE | |
| | | WESNGQPENNYKTTPPVLDSDGSFFLYSKLTVDKSRWQQGNVFSCSVMHEALHN | |
| | | HYTQKSLSLSPGK | |
| iPS:361406 | 2C2.005.001 | QMQVVQSGAEVKKPGASVKVSCKASGYTFTGYYMHWVRQAPGQGLEWMGWIN | 595 |
| | | PNSGGTNYAQKFQGRVTMTRDTSISTAYMELSRLRSDDTAVYYCARGGDYVWGT | |
| | | YRPHYYYGMDVWGQGTTVTVSSASTKGPSVFPLAPSSKSTSGGTAALGCLVKDYF | |
| | | PEPVTVSWNSGALTSGVHTFPAVLQSSGLYSLSSVVTVPSSSLGTQTYICNVNHKPS | |
| | | NTKVDKKVEPKSCDKTHTCPPCPAPELLGGPSVFLFPPKPKDTLMISRTPEVTCVV | |
| | | VDVSHEDPEVKFNWYVDGVEVHNAKTKPCEEQYGSTYRCVSVLTVLHQDWLNG | |
| | | KEYKCKVSNKALPAPIEKTISKAKGQPREPQVYTLPPSREEMTKNQVSLTCLVKGF | |
| | | YPSDIAVEWESNGQPENNYKTTPPVLDSDGSFFLYSKLTVDKSRWQQGNVFSCSV | |
| | | MHEALHNHYTQKSLSLSPGK | |
| iPS:361412 | 2C2.005.002 | QMQVVQSGAEVKKPGASVKVSCKASGYTFTGYYMHWVRQAPGQGLEWMGWIN | 596 |
| | | PNSGGTNYAQKFQGRVTMTRDTSISTAYMELSRLRSDDTAVYYCARGGDYVWGT | |
| | | YRPHYYYGMDVWGQGTTVTVSSASTKGPSVFPLAPSSKSTSGGTAALGCLVKDYF | |
| | | PEPVTVSWNSGALTSGVHTFPAVLQSSGLYSLSSVVTVPSSSLGTQTYICNVNHKPS | |
| | | NTKVDKKVEPKSCDKTHTCPPCPAPELLGGPSVFLFPPKPKDTLMISRTPEVTCVV | |
| | | VDVSHEDPEVKFNWYVDGVEVHNAKTKPCEEQYGSTYRCVSVLTVLHQDWLNG | |
| | | KEYKCKVSNKALPAPIEKTISKAKGQPREPQVYTLPPSREEMTKNQVSLTCLVKGF | |
| | | YPSDIAVEWESNGQPENNYKTTPPVLDSDGSFFLYSKLTVDKSRWQQGNVFSCSV | |
| | | MHEALHNHYTQKSLSLSPGK | |
| iPS:361418 | 2C2.005.003 | QMQVVQSGAEVKKPGASVKVSCKASGYTFTGYYMHWVRQAPGQGLEWMGWIN | 597 |
| | | PNSGGTNYAQKFQGRVTMTRDTSISTAYMELSRLRSDDTAVYYCARGGDYVWGT | |
| | | YRPHYYYGMDVWGQGTTVTVSSASTKGPSVFPLAPSSKSTSGGTAALGCLVKDYF | |
| | | PEPVTVSWNSGALTSGVHTFPAVLQSSGLYSLSSVVTVPSSSLGTQTYICNVNHKPS | |
| | | NTKVDKKVEPKSCDKTHTCPPCPAPELLGGPSVFLFPPKPKDTLMISRTPEVTCVV | |
| | | VDVSHEDPEVKFNWYVDGVEVHNAKTKPCEEQYGSTYRCVSVLTVLHQDWLNG | |
| | | KEYKCKVSNKALPAPIEKTISKAKGQPREPQVYTLPPSREEMTKNQVSLTCLVKGF | |
| | | YPSDIAVEWESNGQPENNYKTTPPVLDSDGSFFLYSKLTVDKSRWQQGNVFSCSV | |
| | | MHEALHNHYTQKSLSLSPGK | |
| iPS:361424 | 2C2.005.004 | QMQVVQSGAEVKKPGASVKVSCKASGYTFTGYYMHWVRQAPGQGLEWMGWIN | 598 |
| | | PNSGGTNYAQKFQGRVTMTRDTSISTAYMELSRLRSDDTAVYYCARGGDYVWGT | |
| | | YRPHYYYGMDVWGQGTTVTVSSASTKGPSVFPLAPSSKSTSGGTAALGCLVKDYF | |
| | | PEPVTVSWNSGALTSGVHTFPAVLQSSGLYSLSSVVTVPSSSLGTQTYICNVNHKPS | |
| | | NTKVDKKVEPKSCDKTHTCPPCPAPELLGGPSVFLFPPKPKDTLMISRTPEVTCVV | |
| | | VDVSHEDPEVKFNWYVDGVEVHNAKTKPCEEQYGSTYRCVSVLTVLHQDWLNG | |
| | | KEYKCKVSNKALPAPIEKTISKAKGQPREPQVYTLPPSREEMTKNQVSLTCLVKGF | |
| | | YPSDIAVEWESNGQPENNYKTTPPVLDSDGSFFLYSKLTVDKSRWQQGNVFSCSV | |
| | | MHEALHNHYTQKSLSLSPGK | |
| iPS:361430 | 2C2.005.005 | QMQVVQSGAEVKKPGASVKVSCKASGYTFTGYYMHWVRQAPGQGLEWMGWIN | 599 |
| | | PNSGGTNYAQKFQGRVTMTRDTSISTAYMELSRLRSDDTAVYYCARGGDYVWGT | |
| | | YRPHYYYGMDVWGQGTTVTVSSASTKGPSVFPLAPSSKSTSGGTAALGCLVKDYF | |
| | | PEPVTVSWNSGALTSGVHTFPAVLQSSGLYSLSSVVTVPSSSLGTQTYICNVNHKPS | |
| | | NTKVDKKVEPKSCDKTHTCPPCPAPELLGGPSVFLFPPKPKDTLMISRTPEVTCVV | |
| | | VDVSHEDPEVKFNWYVDGVEVHNAKTKPCEEQYGSTYRCVSVLTVLHQDWLNG | |
| | | KEYKCKVSNKALPAPIEKTISKAKGQPREPQVYTLPPSREEMTKNQVSLTCLVKGF | |
| | | YPSDIAVEWESNGQPENNYKTTPPVLDSDGSFFLYSKLTVDKSRWQQGNVFSCSV | |
| | | MHEALHNHYTQKSLSLSPGK | |
| iPS:361436 | 2C2.005.006 | QMQVVQSGAEVKKPGASVKVSCKASGYTFTGYYMHWVRQAPGQGLEWMGWIN | 600 |
| | | PNSGGTNYAQKFQGRVTMTRDTSISTAYMELSRLRSDDTAVYYCARGGDYVWGT | |
| | | YRPHYYYGMDVWGQGTTVTVSSASTKGPSVFPLAPSSKSTSGGTAALGCLVKDYF | |
| | | PEPVTVSWNSGALTSGVHTFPAVLQSSGLYSLSSVVTVPSSSLGTQTYICNVNHKPS | |
| | | NTKVDKKVEPKSCDKTHTCPPCPAPELLGGPSVFLFPPKPKDTLMISRTPEVTCVV | |
| | | VDVSHEDPEVKFNWYVDGVEVHNAKTKPCEEQYGSTYRCVSVLTVLHQDWLNG | |
| | | KEYKCKVSNKALPAPIEKTISKAKGQPREPQVYTLPPSREEMTKNQVSLTCLVKGF | |
| | | YPSDIAVEWESNGQPENNYKTTPPVLDSDGSFFLYSKLTVDKSRWQQGNVFSCSV | |
| | | MHEALHNHYTQKSLSLSPGK | |
| iPS:361442 | 2C2.005.007 | QMQVVQSGAEVKKPGASVKVSCKASGYTFTGYYMHWVRQAPGQGLEWMGWIN | 601 |
| | | PNSGGTNYAQKFQGRVTMTRDTSISTAYMELSRLRSDDTAVYYCARGGDYVWGT | |
| | | YRPHYYYGMDVWGQGTTVTVSSASTKGPSVFPLAPSSKSTSGGTAALGCLVKDYF | |
| | | PEPVTVSWNSGALTSGVHTFPAVLQSSGLYSLSSVVTVPSSSLGTQTYICNVNHKPS | |
| | | NTKVDKKVEPKSCDKTHTCPPCPAPELLGGPSVFLFPPKPKDTLMISRTPEVTCVV | |
| | | VDVSHEDPEVKFNWYVDGVEVHNAKTKPCEEQYGSTYRCVSVLTVLHQDWLNG | |
| | | KEYKCKVSNKALPAPIEKTISKAKGQPREPQVYTLPPSREEMTKNQVSLTCLVKGF | |
| | | YPSDIAVEWESNGQPENNYKTTPPVLDSDGSFFLYSKLTVDKSRWQQGNVFSCSV | |
| | | MHEALHNHYTQKSLSLSPGK | |
| iPS:361448 | 2C2.005.008 | QMQVVQSGAEVKKPGASVKVSCKASGYTFTGYYMHWVRQAPGQGLEWMGWIN | 602 |
| | | PNSGGTNYAQKFQGRVTMTRDTSISTAYMELSRLRSDDTAVYYCARGGDYVWGT | |
| | | YRPHYYYGMDVWGQGTTVTVSSASTKGPSVFPLAPSSKSTSGGTAALGCLVKDYF | |
| | | PEPVTVSWNSGALTSGVHTFPAVLQSSGLYSLSSVVTVPSSSLGTQTYICNVNHKPS | |
| | | NTKVDKKVEPKSCDKTHTCPPCPAPELLGGPSVFLFPPKPKDTLMISRTPEVTCVV | |
| | | VDVSHEDPEVKFNWYVDGVEVHNAKTKPCEEQYGSTYRCVSVLTVLHQDWLNG | |
| | | KEYKCKVSNKALPAPIEKTISKAKGQPREPQVYTLPPSREEMTKNQVSLTCLVKGF | |
| | | YPSDIAVEWESNGQPENNYKTTPPVLDSDGSFFLYSKLTVDKSRWQQGNVFSCSV | |
| | | MHEALHNHYTQKSLSLSPGK | |
| iPS:361454 | 2C2.005.009 | QMQVVQSGAEVKKPGASVKVSCKASGYTFTGYYMHWVRQAPGQGLEWMGWIN | 603 |
| | | PNSGGTNYAQKFQGRVTMTRDTSISTAYMELSRLRSDDTAVYYCARGGDYVWGT | |
| | | YRPHYYYGMDVWGQGTTVTVSSASTKGPSVFPLAPSSKSTSGGTAALGCLVKDYF | |
| | | PEPVTVSWNSGALTSGVHTFPAVLQSSGLYSLSSVVTVPSSSLGTQTYICNVNHKPS | |
| | | NTKVDKKVEPKSCDKTHTCPPCPAPELLGGPSVFLFPPKPKDTLMISRTPEVTCVV | |
| | | VDVSHEDPEVKFNWYVDGVEVHNAKTKPCEEQYGSTYRCVSVLTVLHQDWLNG | |
| | | KEYKCKVSNKALPAPIEKTISKAKGQPREPQVYTLPPSREEMTKNQVSLTCLVKGF | |
| | | YPSDIAVEWESNGQPENNYKTTPPVLDSDGSFFLYSKLTVDKSRWQQGNVFSCSV | |
| | | MHEALHNHYTQKSLSLSPGK | |
| iPS:361460 | 2C2.005.010 | QMQVVQSGAEVKKPGASVKVSCKASGYTFTGYYMHWVRQAPGQGLEWMGWIN | 604 |
| | | PNSGGTNYAQKFQGRVTMTRDTSISTAYMELSRLRSDDTAVYYCARGGDYVWGT | |
| | | YRPHYYYGMDVWGQGTTVTVSSASTKGPSVFPLAPSSKSTSGGTAALGCLVKDYF | |
| | | PEPVTVSWNSGALTSGVHTFPAVLQSSGLYSLSSVVTVPSSSLGTQTYICNVNHKPS | |
| | | NTKVDKKVEPKSCDKTHTCPPCPAPELLGGPSVFLFPPKPKDTLMISRTPEVTCVV | |
| | | VDVSHEDPEVKFNWYVDGVEVHNAKTKPCEEQYGSTYRCVSVLTVLHQDWLNG | |
| | | KEYKCKVSNKALPAPIEKTISKAKGQPREPQVYTLPPSREEMTKNQVSLTCLVKGF | |
| | | YPSDIAVEWESNGQPENNYKTTPPVLDSDGSFFLYSKLTVDKSRWQQGNVFSCSV | |
| | | MHEALHNHYTQKSLSLSPGK | |
| iPS:361466 | 2C2.005.011 | QMQVVQSGAEVKKPGASVKVSCKASGYTFTGYYMHWVRQAPGQGLEWMGWIN | 605 |
| | | PNSGGTNYAQKFQGRVTMTRDTSISTAYMELSRLRSDDTAVYYCARGGDYVWGT | |
| | | YRPHYYYGMDVWGQGTTVTVSSASTKGPSVFPLAPSSKSTSGGTAALGCLVKDYF | |
| | | PEPVTVSWNSGALTSGVHTFPAVLQSSGLYSLSSVVTVPSSSLGTQTYICNVNHKPS | |
| | | NTKVDKKVEPKSCDKTHTCPPCPAPELLGGPSVFLFPPKPKDTLMISRTPEVTCVV | |
| | | VDVSHEDPEVKFNWYVDGVEVHNAKTKPCEEQYGSTYRCVSVLTVLHQDWLNG | |
| | | KEYKCKVSNKALPAPIEKTISKAKGQPREPQVYTLPPSREEMTKNQVSLTCLVKGF | |
| | | YPSDIAVEWESNGQPENNYKTTPPVLDSDGSFFLYSKLTVDKSRWQQGNVFSCSV | |
| | | MHEALHNHYTQKSLSLSPGK | |
| iPS:361472 | 2C2.005.012 | QMQVVQSGAEVKKPGASVKVSCKASGYTFTGYYMHWVRQAPGQGLEWMGWIN | 606 |
| | | PNSGGTNYAQKFQGRVTMTRDTSISTAYMELSRLRSDDTAVYYCARGGDYVWGT | |
| | | YRPHYYYGMDVWGQGTTVTVSSASTKGPSVFPLAPSSKSTSGGTAALGCLVKDYF | |
| | | PEPVTVSWNSGALTSGVHTFPAVLQSSGLYSLSSVVTVPSSSLGTQTYICNVNHKPS | |
| | | NTKVDKKVEPKSCDKTHTCPPCPAPELLGGPSVFLFPPKPKDTLMISRTPEVTCVV | |
| | | VDVSHEDPEVKFNWYVDGVEVHNAKTKPCEEQYGSTYRCVSVLTVLHQDWLNG | |
| | | KEYKCKVSNKALPAPIEKTISKAKGQPREPQVYTLPPSREEMTKNQVSLTCLVKGF | |
| | | YPSDIAVEWESNGQPENNYKTTPPVLDSDGSFFLYSKLTVDKSRWQQGNVFSCSV | |
| | | MHEALHNHYTQKSLSLSPGK | |
| iPS:361478 | 2C2.005.013 | QMQVVQSGAEVKKPGASVKVSCKASGYTFTGYYMHWVRQAPGQGLEWMGWIN | 607 |
| | | PNSGGTNYAQKFQGRVTMTRDTSISTAYMELSSLRSDDTAVYYCARGGDYVFGT | |
| | | YRPHYYYGMDVWGQGTTVTVSSASTKGPSVFPLAPSSKSTSGGTAALGCLVKDYF | |
| | | PEPVTVSWNSGALTSGVHTFPAVLQSSGLYSLSSVVTVPSSSLGTQTYICNVNHKPS | |
| | | NTKVDKKVEPKSCDKTHTCPPCPAPELLGGPSVFLFPPKPKDTLMISRTPEVTCVV | |
| | | VDVSHEDPEVKFNWYVDGVEVHNAKTKPCEEQYGSTYRCVSVLTVLHQDWLNG | |
| | | KEYKCKVSNKALPAPIEKTISKAKGQPREPQVYTLPPSREEMTKNQVSLTCLVKGF | |
| | | YPSDIAVEWESNGQPENNYKTTPPVLDSDGSFFLYSKLTVDKSRWQQGNVFSCSV | |
| | | MHEALHNHYTQKSLSLSPGK | |
| iPS:361485 | 2C2.005.014 | QMQVVQSGAEVKKPGASVKVSCKASGYTFTGYYMHWVRQAPGQGLEWMGWIN | 608 |
| | | PNSGGTNYAQKFQGRVTMTRDTSISTAYMELSRLRSDDTAVYYCARGGDYVFGT | |
| | | YRPHYYYGMDVWGQGTTVTVSSASTKGPSVFPLAPSSKSTSGGTAALGCLVKDYF | |
| | | PEPVTVSWNSGALTSGVHTFPAVLQSSGLYSLSSVVTVPSSSLGTQTYICNVNHKPS | |
| | | NTKVDKKVEPKSCDKTHTCPPCPAPELLGGPSVFLFPPKPKDTLMISRTPEVTCVV | |
| | | VDVSHEDPEVKFNWYVDGVEVHNAKTKPCEEQYGSTYRCVSVLTVLHQDWLNG | |
| | | KEYKCKVSNKALPAPIEKTISKAKGQPREPQVYTLPPSREEMTKNQVSLTCLVKGF | |
| | | YPSDIAVEWESNGQPENNYKTTPPVLDSDGSFFLYSKLTVDKSRWQQGNVFSCSV | |
| | | MHEALHNHYTQKSLSLSPGK | |
| iPS:361845 | 18F2.013 | QVQLVESGGGVVQPGRSLRLSCAASGFTFSNFGMHWVRQAPGKGLEWVAVIWY | 609 |
| | | DASNENYADAVKGRFTISRDNSKNTLYLQMNSLRAEDTAVYYCARDRTIFGVVLG | |
| | | DYWGQGTLVTVSSASTKGPSVFPLAPSSKSTSGGTAALGCLVKDYFPEPVTVSWN | |
| | | SGALTSGVHTFPAVLQSSGLYSLSSVVTVPSSSLGTQTYICNVNHKPSNTKVDKKV | |
| | | EPKSCDKTHTCPPCPAPELLGGPSVFLFPPKPKDTLMISRTPEVTCVVVDVSHEDPE | |
| | | VKFNWYVDGVEVHNAKTKPCEEQYGSTYRCVSVLTVLHQDWLNGKEYKCKVSN | |
| | | KALPAPIEKTISKAKGQPREPQVYTLPPSREEMTKNQVSLTCLVKGFYPSDIAVEWE | |
| | | SNGQPENNYKTTPPVLDSDGSFFLYSKLTVDKSRWQQGNVFSCSVMHEALHNHY | |
| | | TQKSLSLSPGK | |
| iPS:361851 | 6H1.009 | QVQLVESGGGVVQPGRSLRLSCAASGFTFSYFGMHWVRQAPGKGLEWVAVIWY | 610 |
| | | DASNKYYADAVKGRFTISRDNSKNTLYLQMNSLRAEDTAVYYCARDRTIFGVLLG | |
| | | DYWGQGTLVTVSSASTKGPSVFPLAPSSKSTSGGTAALGCLVKDYFPEPVTVSWN | |
| | | SGALTSGVHTFPAVLQSSGLYSLSSVVTVPSSSLGTQTYICNVNHKPSNTKVDKKV | |
| | | EPKSCDKTHTCPPCPAPELLGGPSVFLFPPKPKDTLMISRTPEVTCVVVDVSHEDPE | |
| | | VKFNWYVDGVEVHNAKTKPCEEQYGSTYRCVSVLTVLHQDWLNGKEYKCKVSN | |
| | | KALPAPIEKTISKAKGQPREPQVYTLPPSREEMTKNQVSLTCLVKGFYPSDIAVEWE | |
| | | SNGQPENNYKTTPPVLDSDGSFFLYSKLTVDKSRWQQGNVFSCSVMHEALHNHY | |
| | | TQKSLSLSPGK | |
| iPS:361855 | 2C2.005.015 | QMQVVQSGAEVKKPGASVKVSCKASGYTFTGYYMHWVRQAPGQGLEWMGWIN | 611 |
| | | PNSGGTNYAQKFQGRVTMTRDTSISTAYMELSRLRSDDTAVYYCARGGDYVWGT | |
| | | YRPHYYYGMDVWGQGTTVTVSSASTKGPSVFPLAPSSKSTSGGTAALGCLVKDYF | |
| | | PEPVTVSWNSGALTSGVHTFPAVLQSSGLYSLSSVVTVPSSSLGTQTYICNVNHKPS | |
| | | NTKVDKKVEPKSCDKTHTCPPCPAPELLGGPSVFLFPPKPKDTLMISRTPEVTCVV | |
| | | VDVSHEDPEVKFNWYVDGVEVHNAKTKPCEEQYGSTYRCVSVLTVLHQDWLNG | |
| | | KEYKCKVSNKALPAPIEKTISKAKGQPREPQVYTLPPSREEMTKNQVSLTCLVKGF | |
| | | YPSDIAVEWESNGQPENNYKTTPPVLDSDGSFFLYSKLTVDKSRWQQGNVFSCSV | |
| | | MHEALHNHYTQKSLSLSPGK | |
| iPS:336067 | 5G12.006 | QVQLVESGGGVVQPGRSLRLSCTASGFTFSSYGIHWVRQAPGKGLEWVAVIWYD | 612 |
| | | GSNKFHADSVKGRFTISRDNSKNTLYLQMNSLRAEDSAMYFCARGKVAGMPEAF | |
| | | EIWGQGTKVTVSSASTKGPSVFPLAPSSKSTSGGTAALGCLVKDYFPEPVTVSWNS | |
| | | GALTSGVHTFPAVLQSSGLYSLSSVVTVPSSSLGTQTYICNVNHKPSNTKVDKKVE | |
| | | PKSCDKTHTCPPCPAPELLGGPSVFLFPPKPKDTLMISRTPEVTCVVVDVSHEDPEV | |
| | | KFNWYVDGVEVHNAKTKPCEEQYGSTYRCVSVLTVLHQDWLNGKEYKCKVSNK | |
| | | ALPAPIEKTISKAKGQPREPQVYTLPPSREEMTKNQVSLTCLVKGFYPSDIAVEWES | |
| | | NGQPENNYKTTPPVLDSDGSFFLYSKLTVDKSRWQQGNVFSCSVMHEALHNHYT | |
| | | QKSLSLSPGK | |
| iPS:336169 | 17B11.002 | QMQLVQSGAEVKKPGASVKVSCKASGYTFTSYDINWVRQATGQGLEWMGWMN | 613 |
| | | PNSGNTGYAQKFQGRVTMTRDTSISTAYMELSSLRSQDTAVYYCARGGDYVWGS | |
| | | YRPYYYYYGMDVWGQGTTVTVSSASTKGPSVFPLAPSSKSTSGGTAALGCLVKD | |
| | | YFPEPVTVSWNSGALTSGVHTFPAVLQSSGLYSLSSVVTVPSSSLGTQTYICNVNH | |
| | | KPSNTKVDKKVEPKSCDKTHTCPPCPAPELLGGPSVFLFPPKPKDTLMISRTPEVTC | |
| | | VVVDVSHEDPEVKFNWYVDGVEVHNAKTKPCEEQYGSTYRCVSVLTVLHQDWL | |
| | | NGKEYKCKVSNKALPAPIEKTISKAKGQPREPQVYTLPPSREEMTKNQVSLTCLVK | |
| | | GFYPSDIAVEWESNGQPENNYKTTPPVLDSDGSFFLYSKLTVDKSRWQQGNVFSC | |
| | | SVMHEALHNHYTQKSLSLSPGK | |
| iPS:361127 | 5G12.006.001 | QVQLVESGGGVVQPGRSLRLSCAASGFTFSSYGIHWVRQAPGKGLEWVAVIWYD | 614 |
| | | ASNKFHADAVKGRFTISRDNSKNTLYLQMNSLRAEDSAMYFCARGKVAGMPEAF | |
| | | EIWGQGTKVTVSSASTKGPSVFPLAPSSKSTSGGTAALGCLVKDYFPEPVTVSWNS | |
| | | GALTSGVHTFPAVLQSSGLYSLSSVVTVPSSSLGTQTYICNVNHKPSNTKVDKKVE | |
| | | PKSCDKTHTCPPCPAPELLGGPSVFLFPPKPKDTLMISRTPEVTCVVVDVSHEDPEV | |
| | | KFNWYVDGVEVHNAKTKPCEEQYGSTYRCVSVLTVLHQDWLNGKEYKCKVSNK | |
| | | ALPAPIEKTISKAKGQPREPQVYTLPPSREEMTKNQVSLTCLVKGFYPSDIAVEWES | |
| | | NGQPENNYKTTPPVLDSDGSFFLYSKLTVDKSRWQQGNVFSCSVMHEALHNHYT | |
| | | QKSLSLSPGK | |
| iPS:361136 | 5G12.006.002 | QVQLVESGGGVVQPGRSLRLSCTASGFTFSSYGIHWVRQAPGKGLEWVAVIWYD | 615 |
| | | ASNKFHADAVKGRFTISRDNSKNTLYLQMNSLRAEDSAMYFCARGKVAGMPEAF | |
| | | EIWGQGTKVTVSSASTKGPSVFPLAPSSKSTSGGTAALGCLVKDYFPEPVTVSWNS | |
| | | GALTSGVHTFPAVLQSSGLYSLSSVVTVPSSSLGTQTYICNVNHKPSNTKVDKKVE | |
| | | PKSCDKTHTCPPCPAPELLGGPSVFLFPPKPKDTLMISRTPEVTCVVVDVSHEDPEV | |
| | | KFNWYVDGVEVHNAKTKPCEEQYGSTYRCVSVLTVLHQDWLNGKEYKCKVSNK | |
| | | ALPAPIEKTISKAKGQPREPQVYTLPPSREEMTKNQVSLTCLVKGFYPSDIAVEWES | |
| | | NGQPENNYKTTPPVLDSDGSFFLYSKLTVDKSRWQQGNVFSCSVMHEALHNHYT | |
| | | QKSLSLSPGK | |
| iPS:361140 | 5G12.006.003 | QVQLVESGGGVVQPGRSLRLSCAASGFTFSSYGIHWVRQAPGKGLEWVAVIWYD | 616 |
| | | ASNKFHADAVKGRFTISRDNSKNTLYLQMNSLRAEDSAMYFCARGKVAGMPEAF | |
| | | EIWGQGTKVTVSSASTKGPSVFPLAPSSKSTSGGTAALGCLVKDYFPEPVTVSWNS | |
| | | GALTSGVHTFPAVLQSSGLYSLSSVVTVPSSSLGTQTYICNVNHKPSNTKVDKKVE | |
| | | PKSCDKTHTCPPCPAPELLGGPSVFLFPPKPKDTLMISRTPEVTCVVVDVSHEDPEV | |
| | | KFNWYVDGVEVHNAKTKPCEEQYGSTYRCVSVLTVLHQDWLNGKEYKCKVSNK | |
| | | ALPAPIEKTISKAKGQPREPQVYTLPPSREEMTKNQVSLTCLVKGFYPSDIAVEWES | |
| | | NGQPENNYKTTPPVLDSDGSFFLYSKLTVDKSRWQQGNVFSCSVMHEALHNHYT | |
| | | QKSLSLSPGK | |
| iPS:359919 | 5G12.006.004 | QVQLVESGGGVVQPGRSLRLSCAASGFTFSSYGIHWVRQAPGKGLEWVAVIWYD | 617 |
| | | ASNKFHADAVKGRFTISRDNSKNTLYLQMNSLRAEDSAMYFCARGKVAGMPEAF | |
| | | EIWGQGTLVTVSSASTKGPSVFPLAPSSKSTSGGTAALGCLVKDYFPEPVTVSWNS | |
| | | GALTSGVHTFPAVLQSSGLYSLSSVVTVPSSSLGTQTYICNVNHKPSNTKVDKKVE | |
| | | PKSCDKTHTCPPCPAPELLGGPSVFLFPPKPKDTLMISRTPEVTCVVVDVSHEDPEV | |
| | | KFNWYVDGVEVHNAKTKPCEEQYGSTYRCVSVLTVLHQDWLNGKEYKCKVSNK | |
| | | ALPAPIEKTISKAKGQPREPQVYTLPPSREEMTKNQVSLTCLVKGFYPSDIAVEWES | |
| | | NGQPENNYKTTPPVLDSDGSFFLYSKLTVDKSRWQQGNVFSCSVMHEALHNHYT | |
| | | QKSLSLSPGK | |
| iPS:361144 | 5G12.006.005 | QVQLVESGGGVVQPGRSLRLSCAASGFTFSSYGIHWVRQAPGKGLEWVAVIWYD | 618 |
| | | ASNKFHADSVKGRFTISRDNSKNTLYLQMNSLRAEDSAMYFCARGKVAGMPEAF | |
| | | EIWGQGTKVTVSSASTKGPSVFPLAPSSKSTSGGTAALGCLVKDYFPEPVTVSWNS | |
| | | GALTSGVHTFPAVLQSSGLYSLSSVVTVPSSSLGTQTYICNVNHKPSNTKVDKKVE | |
| | | PKSCDKTHTCPPCPAPELLGGPSVFLFPPKPKDTLMISRTPEVTCVVVDVSHEDPEV | |
| | | KFNWYVDGVEVHNAKTKPCEEQYGSTYRCVSVLTVLHQDWLNGKEYKCKVSNK | |
| | | ALPAPIEKTISKAKGQPREPQVYTLPPSREEMTKNQVSLTCLVKGFYPSDIAVEWES | |
| | | NGQPENNYKTTPPVLDSDGSFFLYSKLTVDKSRWQQGNVFSCSVMHEALHNHYT | |
| | | QKSLSLSPGK | |
| iPS:361151 | 5G12.006.006 | QVQLVESGGGVVQPGRSLRLSCAASGFTFSSYGIHWVRQAPGKGLEWVAVIWYD | 619 |
| | | GSNKFHADAVKGRFTISRDNSKNTLYLQMNSLRAEDSAMYFCARGKVAGMPEAF | |
| | | EIWGQGTKVTVSSASTKGPSVFPLAPSSKSTSGGTAALGCLVKDYFPEPVTVSWNS | |
| | | GALTSGVHTFPAVLQSSGLYSLSSVVTVPSSSLGTQTYICNVNHKPSNTKVDKKVE | |
| | | PKSCDKTHTCPPCPAPELLGGPSVFLFPPKPKDTLMISRTPEVTCVVVDVSHEDPEV | |
| | | KFNWYVDGVEVHNAKTKPCEEQYGSTYRCVSVLTVLHQDWLNGKEYKCKVSNK | |
| | | ALPAPIEKTISKAKGQPREPQVYTLPPSREEMTKNQVSLTCLVKGFYPSDIAVEWES | |
| | | NGQPENNYKTTPPVLDSDGSFFLYSKLTVDKSRWQQGNVFSCSVMHEALHNHYT | |
| | | QKSLSLSPGK | |
| iPS:361491 | 17B11.002.001 | QMQLVQSGAEVKKPGASVKVSCKASGYTFTSYDINWVRQATGQGLEWMGWMN | 620 |
| | | PNSGGTGYAQKFQGRVTMTRDTSISTAYMELSSLRSQDTAVYYCARGGDYVWGS | |
| | | YRPYYYYYGMDVWGQGTTVTVSSASTKGPSVFPLAPSSKSTSGGTAALGCLVKD | |
| | | YFPEPVTVSWNSGALTSGVHTFPAVLQSSGLYSLSSVVTVPSSSLGTQTYICNVNH | |
| | | KPSNTKVDKKVEPKSCDKTHTCPPCPAPELLGGPSVFLFPPKPKDTLMISRTPEVTC | |
| | | VVVDVSHEDPEVKFNWYVDGVEVHNAKTKPCEEQYGSTYRCVSVLTVLHQDWL | |
| | | NGKEYKCKVSNKALPAPIEKTISKAKGQPREPQVYTLPPSREEMTKNQVSLTCLVK | |
| | | GFYPSDIAVEWESNGQPENNYKTTPPVLDSDGSFFLYSKLTVDKSRWQQGNVFSC | |
| | | SVMHEALHNHYTQKSLSLSPGK | |
| iPS:361499 | 17B11.002.002 | QMQLVQSGAEVKKPGASVKVSCKASGYTFTSYDINWVRQATGQGLEWMGWMN | 621 |
| | | PNSGNTGYAQKFQGRVTMTRDTSISTAYMELSSLRSQDTAVYYCARGGDYVWGS | |
| | | YRPYYYYYGMDVWGQGTTVTVSSASTKGPSVFPLAPSSKSTSGGTAALGCLVKD | |
| | | YFPEPVTVSWNSGALTSGVHTFPAVLQSSGLYSLSSVVTVPSSSLGTQTYICNVNH | |
| | | KPSNTKVDKKVEPKSCDKTHTCPPCPAPELLGGPSVFLFPPKPKDTLMISRTPEVTC | |
| | | VVVDVSHEDPEVKFNWYVDGVEVHNAKTKPCEEQYGSTYRCVSVLTVLHQDWL | |
| | | NGKEYKCKVSNKALPAPIEKTISKAKGQPREPQVYTLPPSREEMTKNQVSLTCLVK | |
| | | GFYPSDIAVEWESNGQPENNYKTTPPVLDSDGSFFLYSKLTVDKSRWQQGNVFSC | |
| | | SVMHEALHNHYTQKSLSLSPGK | |
| iPS:361503 | 17B11.002.003 | QMQLVQSGAEVKKPGASVKVSCKASGYTFTSYDINWVRQATGQGLEWMGWMN | 622 |
| | | PNSGGTGYAQKFQGRVTMTRDTSISTAYMELSSLRSQDTAVYYCARGGDYVWGS | |
| | | YRPYYYYYGMDVWGQGTTVTVSSASTKGPSVFPLAPSSKSTSGGTAALGCLVKD | |
| | | YFPEPVTVSWNSGALTSGVHTFPAVLQSSGLYSLSSVVTVPSSSLGTQTYICNVNH | |
| | | KPSNTKVDKKVEPKSCDKTHTCPPCPAPELLGGPSVFLFPPKPKDTLMISRTPEVTC | |
| | | VVVDVSHEDPEVKFNWYVDGVEVHNAKTKPCEEQYGSTYRCVSVLTVLHQDWL | |
| | | NGKEYKCKVSNKALPAPIEKTISKAKGQPREPQVYTLPPSREEMTKNQVSLTCLVK | |
| | | GFYPSDIAVEWESNGQPENNYKTTPPVLDSDGSFFLYSKLTVDKSRWQQGNVFSC | |
| | | SVMHEALHNHYTQKSLSLSPGK | |
| iPS:361507 | 17B11.002.004 | QMQLVQSGAEVKKPGASVKVSCKASGYTFTSYDINWVRQAPGQGLEWMGWMN | 623 |
| | | PNSGGTGYAQKFQGRVTMTRDTSISTAYMELSSLRSDDTAVYYCARGGDYVWGS | |
| | | YRPYYYYYGMDVWGQGTTVTVSSASTKGPSVFPLAPSSKSTSGGTAALGCLVKD | |
| | | YFPEPVTVSWNSGALTSGVHTFPAVLQSSGLYSLSSVVTVPSSSLGTQTYICNVNH | |
| | | KPSNTKVDKKVEPKSCDKTHTCPPCPAPELLGGPSVFLFPPKPKDTLMISRTPEVTC | |
| | | VVVDVSHEDPEVKFNWYVDGVEVHNAKTKPCEEQYGSTYRCVSVLTVLHQDWL | |
| | | NGKEYKCKVSNKALPAPIEKTISKAKGQPREPQVYTLPPSREEMTKNQVSLTCLVK | |
| | | GFYPSDIAVEWESNGQPENNYKTTPPVLDSDGSFFLYSKLTVDKSRWQQGNVFSC | |
| | | SVMHEALHNHYTQKSLSLSPGK | |
| iPS:361514 | 17B11.002.005 | QMQLVQSGAEVKKPGASVKVSCKASGYTFTSYDINWVRQATGQGLEWMGWMN | 624 |
| | | PNSGGTGYAQKFQGRVTMTRDTSISTAYMELSSLRSQDTAVYYCARGGDYVWGS | |
| | | YRPYYYYYGMDVWGQGTTVTVSSASTKGPSVFPLAPSSKSTSGGTAALGCLVKD | |
| | | YFPEPVTVSWNSGALTSGVHTFPAVLQSSGLYSLSSVVTVPSSSLGTQTYICNVNH | |
| | | KPSNTKVDKKVEPKSCDKTHTCPPCPAPELLGGPSVFLFPPKPKDTLMISRTPEVTC | |
| | | VVVDVSHEDPEVKFNWYVDGVEVHNAKTKPCEEQYGSTYRCVSVLTVLHQDWL | |
| | | NGKEYKCKVSNKALPAPIEKTISKAKGQPREPQVYTLPPSREEMTKNQVSLTCLVK | |
| | | GFYPSDIAVEWESNGQPENNYKTTPPVLDSDGSFFLYSKLTVDKSRWQQGNVFSC | |
| | | SVMHEALHNHYTQKSLSLSPGK | |
| iPS:360582 | 17B11.002.006 | QMQLVQSGAEVKKPGASVKVSCKASGYTFTSYDINWVRQAPGQGLEWMGWMN | 625 |
| | | PNSGNTGYAQKFQGRVTMTRDTSISTAYMELSSLRSDDTAVYYCARGGDYVWGS | |
| | | YRPYYYYYGMDVWGQGTTVTVSSASTKGPSVFPLAPSSKSTSGGTAALGCLVKD | |
| | | YFPEPVTVSWNSGALTSGVHTFPAVLQSSGLYSLSSVVTVPSSSLGTQTYICNVNH | |
| | | KPSNTKVDKKVEPKSCDKTHTCPPCPAPELLGGPSVFLFPPKPKDTLMISRTPEVTC | |
| | | VVVDVSHEDPEVKFNWYVDGVEVHNAKTKPCEEQYGSTYRCVSVLTVLHQDWL | |
| | | NGKEYKCKVSNKALPAPIEKTISKAKGQPREPQVYTLPPSREEMTKNQVSLTCLVK | |
| | | GFYPSDIAVEWESNGQPENNYKTTPPVLDSDGSFFLYSKLTVDKSRWQQGNVFSC | |
| | | SVMHEALHNHYTQKSLSLSPGK | |
| iPS:361518 | 17B11.002.007 | QMQLVQSGAEVKKPGASVKVSCKASGYTFTSYDINWVRQATGQGLEWMGWMN | 626 |
| | | PNSGGTGYAQKFQGRVTMTRDTSISTAYMELSSLRSQDTAVYYCARGGDYVFGS | |
| | | YRPYYYYYGMDVWGQGTTVTVSSASTKGPSVFPLAPSSKSTSGGTAALGCLVKD | |
| | | YFPEPVTVSWNSGALTSGVHTFPAVLQSSGLYSLSSVVTVPSSSLGTQTYICNVNH | |
| | | KPSNTKVDKKVEPKSCDKTHTCPPCPAPELLGGPSVFLFPPKPKDTLMISRTPEVTC | |
| | | VVVDVSHEDPEVKFNWYVDGVEVHNAKTKPCEEQYGSTYRCVSVLTVLHQDWL | |
| | | NGKEYKCKVSNKALPAPIEKTISKAKGQPREPQVYTLPPSREEMTKNQVSLTCLVK | |
| | | GFYPSDIAVEWESNGQPENNYKTTPPVLDSDGSFFLYSKLTVDKSRWQQGNVFSC | |
| | | SVMHEALHNHYTQKSLSLSPGK | |
| iPS:360570 | 17B11.002.008 | QMQLVQSGAEVKKPGASVKVSCKASGYTFTSYDINWVRQAPGQGLEWMGWMN | 627 |
| | | PNSGGTGYAQKFQGRVTMTRDTSISTAYMELSSLRSDDTAVYYCARGGDYVFGS | |
| | | YRPYYYYYGMDVWGQGTTVTVSSASTKGPSVFPLAPSSKSTSGGTAALGCLVKD | |
| | | YFPEPVTVSWNSGALTSGVHTFPAVLQSSGLYSLSSVVTVPSSSLGTQTYICNVNH | |
| | | KPSNTKVDKKVEPKSCDKTHTCPPCPAPELLGGPSVFLFPPKPKDTLMISRTPEVTC | |
| | | VVVDVSHEDPEVKFNWYVDGVEVHNAKTKPCEEQYGSTYRCVSVLTVLHQDWL | |
| | | NGKEYKCKVSNKALPAPIEKTISKAKGQPREPQVYTLPPSREEMTKNQVSLTCLVK | |
| | | GFYPSDIAVEWESNGQPENNYKTTPPVLDSDGSFFLYSKLTVDKSRWQQGNVFSC | |
| | | SVMHEALHNHYTQKSLSLSPGK | |
| iPS:362051 | 5G12.005.001 | QVQLVESGGGVVQPGRSLRLSCAASGFTFSSYGIHWVRQAPGKGLEWVAVIWYD | 628 |
| | | ASNKFHADAVKGRFTISRDNSKNTLYLQMNSLRAEDSAMYFCARGKVAGMPEAF | |
| | | EIWGQGTLVTVSSASTKGPSVFPLAPSSKSTSGGTAALGCLVKDYFPEPVTVSWNS | |
| | | GALTSGVHTFPAVLQSSGLYSLSSVVTVPSSSLGTQTYICNVNHKPSNTKVDKKVE | |
| | | PKSCDKTHTCPPCPAPELLGGPSVFLFPPKPKDTLMISRTPEVTCVVVDVSHEDPEV | |
| | | KFNWYVDGVEVHNAKTKPCEEQYGSTYRCVSVLTVLHQDWLNGKEYKCKVSNK | |
| | | ALPAPIEKTISKAKGQPREPQVYTLPPSREEMTKNQVSLTCLVKGFYPSDIAVEWES | |
| | | NGQPENNYKTTPPVLDSDGSFFLYSKLTVDKSRWQQGNVFSCSVMHEALHNHYT | |
| | | QKSLSLSPGK | |

TABLE 16
Light Chain (LC) Amino Acid Sequences of Example Anti-GIPR Antibodies with Cysteine Modifications

| Description | LC | SEQ ID NO: |
|---|---|---|
| aGIPR 2G10 | EIVMTQSPATLSVSPGERATLSCRASQSVSSNLAWYQQKPGQAPRLLIYGAATRATGIPARVSG | 388 |
| SEFL2 E384C | SGSGTEFTLTISSLQSEDFAVYYCQQYNNWPLTFGGGTKVEIKRTVAAPSVFIFPPSDEQLKSGT | |
| | ASVVCLLNNFYPREAKVQWKVDNALQSGNSQESVTEQDSKDSTYSLSSTLTLSKADYEKHKV | |
| | YACEVTHQGLSSPVTKSFNRGEC | |
| aGIPR 5G12 | DIQLTQSPSSLSASVGDRVTITCRASQTISRFLNWYQQKPGKAPELLIYVASSLQSGVPSRFSGS | 455 |
| SEFL2 E384C | GSGTDFTLTISSLQPEDFATYYCQQSYSTLISFGQGTKLEITRTVAAPSVFIFPPSDEQLKSGTAS | |
| | VVCLLNNFYPREAKVQWKVDNALQSGNSQESVTEQDSKDSTYSLSSTLTLSKADYEKHKVYA | |
| | CEVTHQGLSSPVTKSFNRGEC | |
| aGIPR 2G10.007 | EIVMTQSPATLSVSPGERATLSCRASQSVSSNLAWYQQKPGQAPRLLIYGAATRATGIPARFSG | 389 |
| SEFL2 E384C | SGSGTEFTLTISSLEPEDFAVYYCQQYNNFPLTFGGGTKVEIKRTVAAPSVFIFPPSDEQLKSGT | |
| | ASVVCLLNNFYPREAKVQWKVDNALQSGNSQESVTEQDSKDSTYSLSSTLTLSKADYEKHKV | |
| | YACEVTHQGLSSPVTKSFNRGEC | |
| aGIPR 5G12 | DIQLTQSPSSLSASVGDRVTITCRASQTISRFLNWYQQKPGKAPELLIYVASSLQSGVPSRFSGS | 455 |
| SEFL2 T487C | GSGTDFTLTISSLQPEDFATYYCQQSYSTLISFGQGTKLEITRTVAAPSVFIFPPSDEQLKSGTAS | |
| | VVCLLNNFYPREAKVQWKVDNALQSGNSQESVTEQDSKDSTYSLSSTLTLSKADYEKHKVYA | |
| | CEVTHQGLSSPVTKSFNRGEC | |
| aGIPR 5G12 | DIQLTQSPSSLSASVGDRVTITCRASQTISRFLNWYQQKPGKAPELLIYVASSLQSGVPSRFSGS | 1575 |
| SEFL2 D88C | GSGTCFTLTISSLQPEDFATYYCQQSYSTLISFGQGTKLEITRTVAAPSVFIFPPSDEQLKSGTAS | |
| | VVCLLNNFYPREAKVQWKVDNALQSGNSQESVTEQDSKDSTYSLSSTLTLSKADYEKHKVYA | |
| | CEVTHQGLSSPVTKSFNRGEC | |

TABLE 17
Heavy Chain (HC) Amino Acid Sequences of Example Anti-GIPR Antibodies with Cysteine Modifications

| Description | HC | SEQ ID NO: |
|---|---|---|
| aGIPR 2G10 | QVQLVESGGGVVQPGRSLRLSCAASGFTFSNYGMHWVRQAPGEGLEWVAAIWFDASDKYY | 1571 |
| SEFL2 E384C | ADAVKGRFTISRDNSKNTLYLQMNSLRAEDTAVYYCARDQAIFGVVPDYWGQGTLVTVSSAS | |
| | TKGPSVFPLAPSSKSTSGGTAALGCLVKDYFPEPVTVSWNSGALTSGVHTFPAVLQSSGLYSLS | |
| | SVVTVPSSSLGTQTYICNVNHKPSNTKVDKKVEPKSCDKTHTCPPCPAPELLGGPSVFLFPPKP | |
| | KDTLMISRTPEVTCVVVDVSHEDPCVKFNWYVDGVEVHNAKTKPCEEQYGSTYRCVSVLTV | |
| | LHQDWLNGKEYKCKVSNKALPAPIEKTISKAKGQPREPQVYTLPPSREEMTKNQVSLTCLVK | |
| | GFYPSDIAVEWESNGQPENNYKTTPPVLDSDGSFFLYSKLTVDKSRWQQGNVFSCSVMHEAL | |
| | HNHYTQKSLSLSPGK | |
| aGIPR 5G12 | QVQLVESGGGVVQPGRSLRLSCTASGFTFSSYGIHWVRQAPGKGLEWVAVIWYDGSNKFHA | 1572 |
| SEFL2 E384C | DSVKGRFTISRDNSKNTLYLQMNSLRAEDSAMYFCARGKVAGMPEAFEIWGQGTKVTVSSAS | |
| | TKGPSVFPLAPSSKSTSGGTAALGCLVKDYFPEPVTVSWNSGALTSGVHTFPAVLQSSGLYSLS | |
| | SVVTVPSSSLGTQTYICNVNHKPSNTKVDKKVEPKSCDKTHTCPPCPAPELLGGPSVFLFPPKP | |
| | KDTLMISRTPEVTCVVVDVSHEDPCVKFNWYVDGVEVHNAKTKPCEEQYGSTYRCVSVLTV | |
| | LHQDWLNGKEYKCKVSNKALPAPIEKTISKAKGQPREPQVYTLPPSREEMTKNQVSLTCLVK | |
| | GFYPSDIAVEWESNGQPENNYKTTPPVLDSDGSFFLYSKLTVDKSRWQQGNVFSCSVMHEAL | |
| | HNHYTQKSLSLSPGK | |
| aGIPR 2G10.007 | QVQLVESGGGVVQPGRSLRLSCAASGFTFSNYGMHWVRQAPGKGLEWVAAIWFDASDKYY | 1573 |
| SEFL2 E384C | ADAVKGRFTISRDNSKNTLYLQMNSLRAEDTAVYYCARDQAIFGVVPDYWGQGTLVTVSSAS | |
| | TKGPSVFPLAPSSKSTSGGTAALGCLVKDYFPEPVTVSWNSGALTSGVHTFPAVLQSSGLYSLS | |
| | SVVTVPSSSLGTQTYICNVNHKPSNTKVDKKVEPKSCDKTHTCPPCPAPELLGGPSVFLFPPKP | |
| | KDTLMISRTPEVTCVVVDVSHEDPCVKFNWYVDGVEVHNAKTKPCEEQYGSTYRCVSVLTV | |
| | LHQDWLNGKEYKCKVSNKALPAPIEKTISKAKGQPREPQVYTLPPSREEMTKNQVSLTCLVK | |
| | GFYPSDIAVEWESNGQPENNYKTTPPVLDSDGSFFLYSKLTVDKSRWQQGNVFSCSVMHEAL | |
| | HNHYTQKSLSLSPGK | |
| aGIPR 5G12 | QVQLVESGGGVVQPGRSLRLSCTASGFTFSSYGIHWVRQAPGKGLEWVAVIWYDGSNKFHA | 1574 |
| SEFL2 T487C | DSVKGRFTISRDNSKNTLYLQMNSLRAEDSAMYFCARGKVAGMPEAFEIWGQGTKVTVSSAS | |
| | TKGPSVFPLAPSSKSTSGGTAALGCLVKDYFPEPVTVSWNSGALTSGVHTFPAVLQSSGLYSLS | |
| | SVVTVPSSSLGTQTYICNVNHKPSNTKVDKKVEPKSCDKTHTCPPCPAPELLGGPSVFLFPPKP | |
| | KDTLMISRTPEVTCVVVDVSHEDPEVKFNWYVDGVEVHNAKTKPCEEQYGSTYRCVSVLTVL | |
| | HQDWLNGKEYKCKVSNKALPAPIEKTISKAKGQPREPQVYTLPPSREEMCKNQVSLTCLVKG | |
| | FYPSDIAVEWESNGQPENNYKTTPPVLDSDGSFFLYSKLTVDKSRWQQGNVFSCSVMHEALH | |
| | NHYTQKSLSLSPGK | |
| aGIPR 5G12 | QVQLVESGGGVVQPGRSLRLSCTASGFTFSSYGIHWVRQAPGKGLEWVAVIWYDGSNKFHA | 612 |
| SEFL2 D88C | DSVKGRFTISRDNSKNTLYLQMNSLRAEDSAMYFCARGKVAGMPEAFEIWGQGTKVTVSSAS | |
| | TKGPSVFPLAPSSKSTSGGTAALGCLVKDYFPEPVTVSWNSGALTSGVHTFPAVLQSSGLYSLS | |
| | SVVTVPSSSLGTQTYICNVNHKPSNTKVDKKVEPKSCDKTHTCPPCPAPELLGGPSVFLFPPKP | |
| | KDTLMISRTPEVTCVVVDVSHEDPEVKFNWYVDGVEVHNAKTKPCEEQYGSTYRCVSVLTVL | |
| | HQDWLNGKEYKCKVSNKALPAPIEKTISKAKGQPREPQVYTLPPSREEMTKNQVSLTCLVKGF | |
| | YPSDIAVEWESNGQPENNYKTTPPVLDSDGSFFLYSKLTVDKSRWQQGNVFSCSVMHEALHN | |
| | HYTQKSLSLSPGK | |

[0960] In some embodiments, the antigen-binding protein (e.g., the anti-GIPR antibody) comprises a light chain variable region and a heavy chain variable region as listed in one of the rows for one of the antibodies listed in Tables 9, 10, and 11. In some embodiments, the antigen-binding protein (e.g., the anti-GIPR antibody) comprises two light chain variable region and two identical heavy chain variable regions from one of the antibodies listed in Tables 9, 10, and 11. In some embodiments, the antigen-binding protein (e.g., the anti-GIPR antibody) comprises a light chain variable region and a heavy chain variable region as listed in one of the rows for one of the antibodies listed in Tables 9, 10, and 11, except that one or both of the light chain variable region and the heavy chain variable region differs from the sequence specified in Table 10 (VL) or Table 11 (VH) at 1, 2, 3, 4, 5, 6, 7, 8, 9, 10, 11, 12, 13, 14 or 15 amino acid residues (combined), wherein each such sequence difference is independently either a single amino acid deletion, insertion, or substitution, with the deletions, insertions and/or substitutions resulting in no more than 1, 2, 3, 4, 5, 6, 7, 8, 9, 10, 11, 12, 13, 14 or 15 amino acid changes (combined) relative to the light chain variable region and heavy chain variable region sequences specified in Table 10 (VL) or Table 11 (VH). In some embodiments, the antigen-binding protein (e.g., the anti-GIPR antibody) comprises a variable region sequence from Table 10 or Table 11, but with the N-terminal methionine deleted.

[0961] In some embodiments, the antigen-binding protein (e.g., the anti-GIPR antibody) comprises a light chain variable region and a heavy chain variable region as listed in one of the rows for one of the antibodies listed in Tables 9, 10, or 11, except that one or both of the variable regions differs from the amino acid sequence specified in Table 10 (VL) or Table 11 (VH) in that the heavy chain variable region and/or light chain variable region comprises or consists of a sequence of amino acids that has at least 70%, 75%, 80%, 85%, 90%, 95%, 96%, 97%, 98%, or 99% sequence identity to the amino acid sequences of the heavy chain variable region or light chain variable domain region as specified in Table 11 or Table 10, respectively.

[0962] In some embodiments, the antigen-binding protein consists just of a light chain variable region or a heavy chain variable region from an antibody listed in Table 9.

[0963] In some embodiments, the antigen-binding protein comprises two or more of the same heavy chain variable region or two or more of the same light chain variable region from those listed in Tables 10 and 11. Such domain antibodies can be fused together or joined via a linker moiety, such as a linker moiety described below. The domain antibodies can also be fused or linked to one or more molecules to extend the half-life (such as, e.g., PEG or albumin).

[0964] Other antigen-binding proteins that are provided are variants of antibodies formed by combination of the heavy and light chains shown in Tables 10 and 11 and comprise light and/or heavy chains that each have at least 70%, at least 75%, at least 80%, at least 85%, at least 90%, at least 95%, at least 96%, at least 97%, at least 98%, or at least 99% identity to the amino acid sequences of these chains. In some embodiments, such antibody variants comprise at least one heavy chain and at least one light chain. In some embodiments, the antibody variant comprises two identical light chains and two identical heavy chains.

[0965] In some embodiments, the antigen-binding protein is a human antibody comprising a sequence as set forth in Table 9 and is of the IgG₁-, IgG₂- IgG₃-, or IgG₄-type.

[0966] In some embodiments, the antigen-binding protein (e.g., the anti-GIPR antibody) comprises a light chain variable region comprising an amino acid sequence selected from the group consisting of SEQ ID NOs: 1-157 and a heavy chain variable region comprising an amino acid sequence selected from the group consisting of SEQ ID NOs: 158-314.

[0967] In some embodiments, the antigen-binding protein is an antibody comprising a light chain variable region comprising an amino acid sequence selected from the group consisting of SEQ ID NOs: 1-157 and a heavy chain variable region comprising an amino acid sequence selected from the group consisting of SEQ ID NOs: 158-314, wherein the antibody comprises at least one cysteine conjugation site at a position selected from the group consisting of 88 (e.g., D88) of the light chain, 384 (e.g., E384) of the heavy chain, and 487 (e.g., T487) of the heavy chain, all according to AHo numbering.

[0968] In some embodiments, the antigen-binding protein (e.g., the anti-GIPR antibody) comprises a light chain variable region and a heavy chain variable region, wherein the light chain variable region and the heavy chain variable region comprise amino acid sequences selected from:
[0969] i. SEQ ID NO: 1 and SEQ ID NO: 158, respectively;
[0970] ii. SEQ ID NO: 2 and SEQ ID NO: 159, respectively;
[0971] iii. SEQ ID NO: 3 and SEQ ID NO: 160, respectively;
[0972] iv. SEQ ID NO: 4 and SEQ ID NO: 161, respectively;
[0973] v. SEQ ID NO: 5 and SEQ ID NO: 162, respectively;
[0974] vi. SEQ ID NO: 6 and SEQ ID NO: 163, respectively;
[0975] vii. SEQ ID NO: 7 and SEQ ID NO: 164, respectively;
[0976] viii. SEQ ID NO: 8 and SEQ ID NO: 165, respectively;
[0977] ix. SEQ ID NO: 9 and SEQ ID NO: 166, respectively;
[0978] x. SEQ ID NO: 10 and SEQ ID NO: 167, respectively;
[0979] xi. SEQ ID NO: 11 and SEQ ID NO: 168, respectively;
[0980] xii. SEQ ID NO: 12 and SEQ ID NO: 169, respectively;
[0981] xiii. SEQ ID NO: 13 and SEQ ID NO: 170, respectively;
[0982] xiv. SEQ ID NO: 14 and SEQ ID NO: 171, respectively;
[0983] xv. SEQ ID NO: 15 and SEQ ID NO: 172, respectively;
[0984] xvi. SEQ ID NO: 16 and SEQ ID NO: 173, respectively;
[0985] xvii. SEQ ID NO: 17 and SEQ ID NO: 174, respectively;
[0986] xviii. SEQ ID NO: 18 and SEQ ID NO: 175, respectively;
[0987] xix. SEQ ID NO: 19 and SEQ ID NO: 176, respectively;
[0988] xx. SEQ ID NO: 20 and SEQ ID NO: 177, respectively;
[0989] xxi. SEQ ID NO: 21 and SEQ ID NO: 178, respectively;
[0990] xxii. SEQ ID NO: 22 and SEQ ID NO: 179, respectively;
[0991] xxiii. SEQ ID NO: 23 and SEQ ID NO: 180, respectively;
[0992] xxiv. SEQ ID NO: 24 and SEQ ID NO: 181, respectively;
[0993] xxv. SEQ ID NO: 25 and SEQ ID NO: 182, respectively;
[0994] xxvi. SEQ ID NO: 26 and SEQ ID NO: 183, respectively;
[0995] xxvii. SEQ ID NO: 27 and SEQ ID NO: 184, respectively;
[0996] xxviii. SEQ ID NO: 28 and SEQ ID NO: 185, respectively;
[0997] xxix. SEQ ID NO: 29 and SEQ ID NO: 186, respectively;
[0998] xxx. SEQ ID NO: 30 and SEQ ID NO: 187, respectively;
[0999] xxxi. SEQ ID NO: 31 and SEQ ID NO: 188, respectively;
[1000] xxxii. SEQ ID NO: 32 and SEQ ID NO: 189, respectively;
[1001] xxxiii. SEQ ID NO: 33 and SEQ ID NO: 190, respectively;
[1002] xxxiv. SEQ ID NO: 34 and SEQ ID NO: 191, respectively;
[1003] xxxv. SEQ ID NO: 35 and SEQ ID NO: 192, respectively;
[1004] xxxvi. SEQ ID NO: 36 and SEQ ID NO: 193, respectively;
[1005] xxxvii. SEQ ID NO: 37 and SEQ ID NO: 194, respectively;
[1006] xxxviii. SEQ ID NO: 38 and SEQ ID NO: 195, respectively;
[1007] xxxix. SEQ ID NO: 39 and SEQ ID NO: 196, respectively;
[1008] xl. SEQ ID NO: 40 and SEQ ID NO: 197, respectively;
[1009] xli. SEQ ID NO: 41 and SEQ ID NO: 198, respectively;
[1010] xlii. SEQ ID NO: 42 and SEQ ID NO: 199, respectively;
[1011] xliii. SEQ ID NO: 43 and SEQ ID NO: 200, respectively;
[1012] xliv. SEQ ID NO: 44 and SEQ ID NO: 201, respectively;
[1013] xlv. SEQ ID NO: 45 and SEQ ID NO: 202, respectively;
[1014] xlvi. SEQ ID NO: 46 and SEQ ID NO: 203, respectively;
[1015] xlvii. SEQ ID NO: 47 and SEQ ID NO: 204, respectively;
[1016] xlviii. SEQ ID NO: 48 and SEQ ID NO: 205, respectively;
[1017] xlix. SEQ ID NO: 49 and SEQ ID NO: 206, respectively;
[1018] l. SEQ ID NO: 50 and SEQ ID NO: 207, respectively;
[1019] li. SEQ ID NO: 51 and SEQ ID NO: 208, respectively;
[1020] lii. SEQ ID NO: 52 and SEQ ID NO: 209, respectively;
[1021] liii. SEQ ID NO: 53 and SEQ ID NO: 210, respectively;
[1022] liv. SEQ ID NO: 54 and SEQ ID NO: 211, respectively;
[1023] lv. SEQ ID NO: 55 and SEQ ID NO: 212, respectively;
[1024] lvi. SEQ ID NO: 56 and SEQ ID NO: 213, respectively;
[1025] lvii. SEQ ID NO: 57 and SEQ ID NO: 214, respectively;
[1026] lviii. SEQ ID NO: 58 and SEQ ID NO: 215, respectively;
[1027] lix. SEQ ID NO: 59 and SEQ ID NO: 216, respectively;
[1028] lx. SEQ ID NO: 60 and SEQ ID NO: 217, respectively;
[1029] lxi. SEQ ID NO: 61 and SEQ ID NO: 218, respectively;
[1030] lxii. SEQ ID NO: 62 and SEQ ID NO: 219, respectively;
[1031] lxiii. SEQ ID NO: 63 and SEQ ID NO: 220, respectively;
[1032] lxiv. SEQ ID NO: 64 and SEQ ID NO: 221, respectively;
[1033] lxv. SEQ ID NO: 65 and SEQ ID NO: 222, respectively;
[1034] lxvi. SEQ ID NO: 66 and SEQ ID NO: 223, respectively;
[1035] lxvii. SEQ ID NO: 67 and SEQ ID NO: 224, respectively;
[1036] lxviii. SEQ ID NO: 68 and SEQ ID NO: 225, respectively;
[1037] lxix. SEQ ID NO: 69 and SEQ ID NO: 226, respectively;
[1038] lxx. SEQ ID NO: 70 and SEQ ID NO: 227, respectively;
[1039] lxxi. SEQ ID NO: 71 and SEQ ID NO: 228, respectively;
[1040] lxxii. SEQ ID NO: 72 and SEQ ID NO: 229, respectively;
[1041] lxxiii. SEQ ID NO: 73 and SEQ ID NO: 230, respectively;
[1042] lxxiv. SEQ ID NO: 74 and SEQ ID NO: 231, respectively;
[1043] lxxv. SEQ ID NO: 75 and SEQ ID NO: 232, respectively;
[1044] lxxvi. SEQ ID NO: 76 and SEQ ID NO: 233, respectively;
[1045] lxxvii. SEQ ID NO: 77 and SEQ ID NO: 234, respectively;
[1046] lxxviii. SEQ ID NO: 78 and SEQ ID NO: 235, respectively;
[1047] lxxix. SEQ ID NO: 79 and SEQ ID NO: 236, respectively;
[1048] lxxx. SEQ ID NO: 80 and SEQ ID NO: 237, respectively;
[1049] lxxxi. SEQ ID NO: 81 and SEQ ID NO: 238, respectively;
[1050] lxxxii. SEQ ID NO: 82 and SEQ ID NO: 239, respectively;
[1051] lxxxiii. SEQ ID NO: 83 and SEQ ID NO: 240, respectively;
[1052] lxxxiv. SEQ ID NO: 84 and SEQ ID NO: 241, respectively;
[1053] lxxxv. SEQ ID NO: 85 and SEQ ID NO: 242, respectively;
[1054] lxxxvi. SEQ ID NO: 86 and SEQ ID NO: 243, respectively;
[1055] lxxxvii. SEQ ID NO: 87 and SEQ ID NO: 244, respectively;
[1056] lxxxviii. SEQ ID NO: 88 and SEQ ID NO: 245, respectively;
[1057] lxxxix. SEQ ID NO: 89 and SEQ ID NO: 246, respectively;
[1058] xc. SEQ ID NO: 90 and SEQ ID NO: 247, respectively;
[1059] xci. SEQ ID NO: 91 and SEQ ID NO: 248, respectively;
[1060] xcii. SEQ ID NO: 92 and SEQ ID NO: 249, respectively;
[1061] xciii. SEQ ID NO: 93 and SEQ ID NO: 250, respectively;
[1062] xciv. SEQ ID NO: 94 and SEQ ID NO: 251, respectively;
[1063] xcv. SEQ ID NO: 95 and SEQ ID NO: 252, respectively;
[1064] xcvi. SEQ ID NO: 96 and SEQ ID NO: 253, respectively;
[1065] xcvii. SEQ ID NO: 97 and SEQ ID NO: 254, respectively;
[1066] xcviii. SEQ ID NO: 98 and SEQ ID NO: 255, respectively;
[1067] xcix. SEQ ID NO: 99 and SEQ ID NO: 256, respectively;
[1068] c. SEQ ID NO: 100 and SEQ ID NO: 257, respectively;
[1069] ci. SEQ ID NO: 101 and SEQ ID NO: 258, respectively;
[1070] cii. SEQ ID NO: 102 and SEQ ID NO: 259, respectively;
[1071] ciii. SEQ ID NO: 103 and SEQ ID NO: 260, respectively;
[1072] civ. SEQ ID NO: 104 and SEQ ID NO: 261, respectively;
[1073] cv. SEQ ID NO: 105 and SEQ ID NO: 262, respectively;
[1074] cvi. SEQ ID NO: 106 and SEQ ID NO: 263, respectively;
[1075] cvii. SEQ ID NO: 107 and SEQ ID NO: 264, respectively;
[1076] cviii. SEQ ID NO: 108 and SEQ ID NO: 265, respectively;
[1077] cix. SEQ ID NO: 109 and SEQ ID NO: 266, respectively;
[1078] cx. SEQ ID NO: 110 and SEQ ID NO: 267, respectively;
[1079] cxi. SEQ ID NO: 111 and SEQ ID NO: 268, respectively;
[1080] cxii. SEQ ID NO: 112 and SEQ ID NO: 269, respectively;
[1081] cxiii. SEQ ID NO: 113 and SEQ ID NO: 270, respectively;
[1082] cxiv. SEQ ID NO: 114 and SEQ ID NO: 271, respectively;
[1083] cxv. SEQ ID NO: 115 and SEQ ID NO: 272, respectively;
[1084] cxvi. SEQ ID NO: 116 and SEQ ID NO: 273, respectively;
[1085] cxvii. SEQ ID NO: 117 and SEQ ID NO: 274, respectively;
[1086] cxviii. SEQ ID NO: 118 and SEQ ID NO: 275, respectively;
[1087] cxix. SEQ ID NO: 119 and SEQ ID NO: 276, respectively;
[1088] cxx. SEQ ID NO: 120 and SEQ ID NO: 277, respectively;
[1089] cxxi. SEQ ID NO: 121 and SEQ ID NO: 278, respectively;
[1090] cxxii. SEQ ID NO: 122 and SEQ ID NO: 279, respectively;
[1091] cxxiii. SEQ ID NO: 123 and SEQ ID NO: 280, respectively;
[1092] cxxiv. SEQ ID NO: 124 and SEQ ID NO: 281, respectively;
[1093] cxxv. SEQ ID NO: 125 and SEQ ID NO: 282, respectively;
[1094] cxxvi. SEQ ID NO: 126 and SEQ ID NO: 283, respectively;
[1095] cxxvii. SEQ ID NO: 127 and SEQ ID NO: 284, respectively;
[1096] cxxviii. SEQ ID NO: 128 and SEQ ID NO: 285, respectively;
[1097] cxxix. SEQ ID NO: 129 and SEQ ID NO: 286, respectively;
[1098] cxxx. SEQ ID NO: 130 and SEQ ID NO: 287, respectively;
[1099] cxxxi. SEQ ID NO: 131 and SEQ ID NO: 288, respectively;
[1100] cxxxii. SEQ ID NO: 132 and SEQ ID NO: 289, respectively;
[1101] cxxxiii. SEQ ID NO: 133 and SEQ ID NO: 290, respectively;
[1102] cxxxiv. SEQ ID NO: 134 and SEQ ID NO: 291, respectively;
[1103] cxxxv. SEQ ID NO: 135 and SEQ ID NO: 292, respectively;
[1104] cxxxvi. SEQ ID NO: 136 and SEQ ID NO: 293, respectively;
[1105] cxxxvii. SEQ ID NO: 137 and SEQ ID NO: 294, respectively;
[1106] cxxxviii. SEQ ID NO: 138 and SEQ ID NO: 295, respectively;
[1107] cxxxix. SEQ ID NO: 139 and SEQ ID NO: 296, respectively;
[1108] cxl. SEQ ID NO: 140 and SEQ ID NO: 297, respectively;
[1109] cxli. SEQ ID NO: 141 and SEQ ID NO: 298, respectively;
[1110] cxlii. SEQ ID NO: 142 and SEQ ID NO: 299, respectively;
[1111] cxliii. SEQ ID NO: 143 and SEQ ID NO: 300, respectively;
[1112] cxliv. SEQ ID NO: 144 and SEQ ID NO: 301, respectively;
[1113] cxlv. SEQ ID NO: 145 and SEQ ID NO: 302, respectively;
[1114] cxlvi. SEQ ID NO: 146 and SEQ ID NO: 303, respectively;
[1115] cxlvii. SEQ ID NO: 147 and SEQ ID NO: 304, respectively;
[1116] cxlviii. SEQ ID NO: 148 and SEQ ID NO: 305, respectively;
[1117] cxlix. SEQ ID NO: 149 and SEQ ID NO: 306, respectively;
[1118] cl. SEQ ID NO: 150 and SEQ ID NO: 307, respectively;
[1119] cli. SEQ ID NO: 151 and SEQ ID NO: 308, respectively;
[1120] clii. SEQ ID NO: 152 and SEQ ID NO: 309, respectively;
[1121] cliii. SEQ ID NO: 153 and SEQ ID NO: 310, respectively;
[1122] cliv. SEQ ID NO: 154 and SEQ ID NO: 311, respectively;
[1123] clv. SEQ ID NO: 155 and SEQ ID NO: 312, respectively;
[1124] clvi. SEQ ID NO: 156 and SEQ ID NO: 313, respectively; and
[1125] clvii. SEQ ID NO: 157 and SEQ ID NO: 314, respectively,
[1126] preferably wherein the light chain variable region and the heavy chain variable region comprise the amino acid sequences of SEQ ID NO: 74 and SEQ ID NO: 231, respectively.

[1127] In some embodiments, the antigen-binding protein is an antibody comprising at least one cysteine conjugation site at a position selected from the group consisting of 88 (e.g., D88) of the light chain, 384 (e.g., E384) of the heavy chain, and 487 (e.g., T487) of the heavy chain, all according to AHo numbering.

[1128] In some embodiments, the antigen-binding protein (e.g., the anti-GIPR antibody) is a polypeptide into which one or more CDRs are grafted, inserted, and/or joined. In some embodiments, the antigen-binding protein has 1, 2, 3, 4, 5, or 6 CDRs. An antigen-binding protein thus can have, for example, one heavy chain CDR1 (“CDRH1”), and/or one heavy chain CDR2 (“CDRH2”), and/or one heavy chain CDR3 (“CDRH3”), and/or one light chain CDR1 (“CDRL1”), and/or one light chain CDR2 (“CDRL2”), and/or one light chain CDR3 (“CDRL3”). In some embodiments, the antigen-binding protein comprises both a CDRH3 and a CDRL3. Specific light and heavy chain CDRs are identified in Tables 12 and 13, respectively.

[1129] Complementarity determining regions (CDRs) and framework regions (FR) of a given antibody may be identified using the system described by Kabat et al. in Sequences of Proteins of Immunological Interest, 5th Ed., US Dept. of Health and Human Services, PHS, NIH, NIH Publication no. 91-3242, 1991. Certain antibodies that are disclosed herein comprise one or more amino acid sequences that are identical or have substantial sequence identity to the amino acid sequences of one or more of the CDRs presented in Tables 12 and 13. The specific CDRs identified in Tables 12 and 13 are defined by Kabat.

[1130] The structure and properties of CDRs within a naturally occurring antibody have been described above. Briefly, in a traditional antibody, the CDRs are embedded within a framework in the heavy or light chain variable region where they constitute the regions responsible for antigen binding and recognition. A variable region comprises at least three heavy or light chain CDRs, see, supra (Kabat et al., 1991, Sequences of Proteins of Immunological Interest, Public Health Service N.I.H., Bethesda, MD; see also Chothia and Lesk, 1987, J. Mol. Biol. 196:901-917; Chothia et al., 1989, Nature 342: 877-883), within a framework region (designated framework regions 1-4, FR1, FR2, FR3, and FR4, by Kabat et al., 1991, supra; see also Chothia and Lesk, 1987, supra). The CDRs provided herein, however, may not only be used to define the antigen-binding domain of a traditional antibody structure, but may be embedded in a variety of other polypeptide structures, as described herein.

[1131] In some embodiments, the antigen-binding protein (e.g., an anti-GIPR antibody) comprises 1, 2, 3, 4, 5, or 6 variant forms of the CDRs listed in Tables 12 and 13, each having at least 80%, at least 85%, at least 90%, at least 95%, at least 96%, at least 97%, at least 98%, or at least 99% sequence identity to a CDR sequence listed in Table 12 or 13. In some embodiments, an antigen-binding protein (e.g., an anti-GIPR antibody) comprises 1, 2, 3, 4, 5, or 6 of the CDRs listed in Tables 12 and 13, each or collectively differing by no more than 1, 2, 3, 4 or 5 amino acids from the CDRs listed in these tables.

[1132] In some embodiments, the antigen-binding protein (e.g., the anti-GIPR antibody) comprises 1, 2, 3, 4, 5, or all 6 of the CDRs listed in one of the rows for any particular antibody listed in Table 9.

[1133] In some embodiments, the antigen-binding protein (e.g., the anti-GIPR antibody) comprises 1, 2, 3, 4, 5, or 6 variant forms of the CDRs listed in one of the rows for an antibody in Table 9, each CDR having at least 80%, at least 85%, at least 90%, at least 95%, at least 96%, at least 97%, at least 98%, or at least 99% sequence identity to a CDR sequence listed in Table 12 or 13.

[1134] In some embodiments, the antigen-binding protein (e.g., the anti-GIPR antibody) comprises 1, 2, 3, 4, 5, or 6 of the CDRs listed in one of the rows of Table 9, each differing by no more than 1, 2, 3, 4, or 5 amino acids from the CDRs listed in Table 9.

[1135] In some embodiments, the antigen-binding protein (e.g., the anti-GIPR antibody) comprises all six of the CDRs listed in a row of Table 9 and the total number of amino acid changes to the CDRs collectively is no more than 1, 2, 3, 4, or 5 amino acids.

[1136] In some embodiments, the antigen-binding protein (e.g., the anti-GIPR antibody) comprises a light chain variable (VL) region in which the full set of VL CDRs 1, 2, and 3 (combined) has at least 95% sequence identity to the VL CDRs 1, 2, and 3 of any one of SEQ ID NOs: 1-157. In some embodiments, the antigen-binding protein (e.g., the anti-GIPR antibody) comprises a light chain variable (VL) region in which the full set of VL CDRs 1, 2, and 3 (combined) has at least 95% sequence identity to the VL CDRs 1, 2, and 3 of any one of SEQ ID NOs: 1-157, wherein the VL CDRs 1, 2, and 3 are defined by any one of Kabat, Chothia, or IGMT. In some embodiments, the antigen-binding protein (e.g., the anti-GIPR antibody) comprises light chain variable (VL) region in which the full set of VL CDRs 1, 2, and 3 (combined) has at least 95% sequence identity to the VL CDRs 1, 2, and 3 of any one of SEQ ID NOs: 1-157, wherein the VL CDRs 1, 2, and 3 are defined by Kabat. In some embodiments, the antigen-binding protein (e.g., the anti-GIPR antibody) comprises a light chain variable (VL) region in which the full set of VL CDRs 1, 2, and 3 (combined) has at least 95% sequence identity to the VL CDRs 1, 2, and 3 of any one of SEQ ID NOs: 1-157, wherein the VL CDRs 1, 2, and 3 are defined by Chothia. In some embodiments, the antigen-binding protein (e.g., the anti-GIPR antibody) comprises a light chain variable (VL) region in which the full set of VL CDRs 1, 2, and 3 (combined) has at least 95% sequence identity to the VL CDRs 1, 2, and 3 of any one of SEQ ID NOs: 1-157, wherein the VL CDRs 1, 2, and 3 are defined by IGMT.

[1137] In some embodiments, the antigen-binding protein (e.g., the anti-GIPR antibody) comprises a light chain variable (VL) region in which the full set of VL CDRs 1, 2, and 3 (combined) is identical to the VL CDRs 1, 2, and 3 of any one of SEQ ID NOs: 1-157. In some embodiments, the antigen-binding protein (e.g., the anti-GIPR antibody) comprises a light chain variable (VL) region in which the full set of VL CDRs 1, 2, and 3 (combined) is identical to the VL CDRs 1, 2, and 3 of any one of SEQ ID NOs: 1-157, wherein the VL CDRs 1, 2, and 3 are defined by any one of Kabat, Chothia, or IGMT. In some embodiments, the antigen-binding protein (e.g., the anti-GIPR antibody) comprises light chain variable (VL) region in which the full set of VL CDRs 1, 2, and 3 (combined) is identical to the VL CDRs 1, 2, and 3 of any one of SEQ ID NOs: 1-157, wherein the VL CDRs 1, 2, and 3 are defined by Kabat. In some embodiments, the antigen-binding protein (e.g., the anti-GIPR antibody) comprises a light chain variable (VL) region in which the full set of VL CDRs 1, 2, and 3 (combined) is identical to the VL CDRs 1, 2, and 3 of any one of SEQ ID NOs: 1-157, wherein the VL CDRs 1, 2, and 3 are defined by Chothia. In some embodiments, the antigen-binding protein (e.g., the anti-GIPR antibody) comprises a light chain variable (VL) region in which the full set of VL CDRs 1, 2, and 3 (combined) is identical to the VL CDRs 1, 2, and 3 of any one of SEQ ID NOs: 1-157, wherein the VL CDRs 1, 2, and 3 are defined by IGMT.

[1138] In some embodiments, the antigen-binding protein (e.g., the anti-GIPR antibody) comprises a heavy chain variable (VH) region in which the full set of VH CDRs 1, 2, and 3 (combined) has at least 95% sequence identity to the VH CDRs 1, 2, and 3 of any one of SEQ ID NOs: 158-314. In some embodiments, the antigen-binding protein (e.g., the anti-GIPR antibody) comprises a heavy chain variable (VH) region in which the full set of VH CDRs 1, 2, and 3 (combined) has at least 95% sequence identity to the VH CDRs 1, 2, and 3 of any one of SEQ ID NOs: 158-314, wherein the VH CDRs 1, 2, and 3 are defined by any one of Kabat, Chothia, or IGMT. In some embodiments, the antigen-binding protein (e.g., the anti-GIPR antibody) comprises a heavy chain variable (VH) region in which the full set of VH CDRs 1, 2, and 3 (combined) has at least 95% sequence identity to the VH CDRs 1, 2, and 3 of any one of SEQ ID NOs: 158-314, wherein the VH CDRs 1, 2, and 3 are defined by Kabat. In some embodiments, the antigen-binding protein (e.g., the anti-GIPR antibody) comprises a heavy chain variable (VH) region in which the full set of VH CDRs 1, 2, and 3 (combined) has at least 95% sequence identity to the VH CDRs 1, 2, and 3 of any one of SEQ ID NOs: 158-314, wherein the VH CDRs 1, 2, and 3 are defined by Chothia. In some embodiments, the antigen-binding protein (e.g., the anti-GIPR antibody) comprises a heavy chain variable (VH) region in which the full set of VH CDRs 1, 2, and 3 (combined) has at least 95% sequence identity to the VH CDRs 1, 2, and 3 of any one of SEQ ID NOs: 158-314, wherein the VH CDRs 1, 2, and 3 are defined by IGMT.

[1139] In some embodiments, the antigen-binding protein (e.g., the anti-GIPR antibody) comprises a heavy chain variable (VH) region in which the full set of VH CDRs 1, 2, and 3 (combined) is identical to the VH CDRs 1, 2, and 3 of any one of SEQ ID NOs: 158-314. In some embodiments, the antigen-binding protein (e.g., the anti-GIPR antibody) comprises a heavy chain variable (VH) region in which the full set of VH CDRs 1, 2, and 3 (combined) is identical to the VH CDRs 1, 2, and 3 of any one of SEQ ID NOs: 158-314, wherein the VH CDRs 1, 2, and 3 are defined by any one of Kabat, Chothia, or IGMT. In some embodiments, the antigen-binding protein (e.g., the anti-GIPR antibody) comprises a heavy chain variable (VH) region in which the full set of VH CDRs 1, 2, and 3 (combined) is identical to the VH CDRs 1, 2, and 3 of any one of SEQ ID NOs: 158-314, wherein the VH CDRs 1, 2, and 3 are defined by Kabat. In some embodiments, the antigen-binding protein (e.g., the anti-GIPR antibody) comprises a heavy chain variable (VH) region in which the full set of VH CDRs 1, 2, and 3 (combined) is identical to the VH CDRs 1, 2, and 3 of any one of SEQ ID NOs: 158-314, wherein the VH CDRs 1, 2, and 3 are defined by Chothia. In some embodiments, the antigen-binding protein (e.g., the anti-GIPR antibody) comprises a heavy chain variable (VH) region in which the full set of VH CDRs 1, 2, and 3 (combined) is identical to the VH CDRs 1, 2, and 3 of any one of SEQ ID NOs: 158-314, wherein the VH CDRs 1, 2, and 3 are defined by IGMT.

[1140] In some embodiments, the antigen-binding protein (e.g., the anti-GIPR antibody) comprises a light chain variable (VL) region in which the full set of VL CDRs 1, 2, and 3 (combined) is identical to the VL CDRs 1, 2, and 3 of an antibody of Table 9 and a heavy chain variable (VH) region in which the full set of VH CDRs 1, 2, and 3 (combined) is identical to the VH CDRs 1, 2, and 3 of an antibody of Table 9. In some embodiments, the antigen-binding protein (e.g., the anti-GIPR antibody) comprises a VL region in which the full set of VL CDRs 1, 2, and 3 (combined) is identical to the VL CDRs 1, 2, and 3 of an antibody of Table 9 and a VH region in which the full set of VH CDRs 1, 2, and 3 (combined) is identical to the VH CDRs 1, 2, and 3 of an antibody of Table 9, wherein the VL CDRs 1, 2, and 3 and the VH CDRs 1, 2, and 3 are defined by any one of Kabat, Chothia, or IGMT. In some embodiments, the VL CDRs 1, 2, and 3 and the VH CDRs 1, 2, and 3 are defined by Kabat. In some embodiments, the VL CDRs 1, 2, and 3 and the VH CDRs 1, 2, and 3 are defined by Chothia. In some embodiments, the VL CDRs 1, 2, and 3 and the VH CDRs 1, 2, and 3 are defined by IGMT.

[1141] In some embodiments, the antigen-binding protein (e.g., the anti-GIPR antibody) comprises a light chain variable (VL) region in which the full set of VL CDRs 1, 2, and 3 (combined) is identical to the VL CDRs 1, 2, and 3 of SEQ ID NO: 74 and a heavy chain variable (VH) region in which the full set of VH CDRs 1, 2, and 3 (combined) is identical to the VH CDRs 1, 2, and 3 of SEQ ID NO: 231. In some embodiments, the antigen-binding protein (e.g., the anti-GIPR antibody) comprises a VL region in which the full set of VL CDRs 1, 2, and 3 (combined) is identical to the VL CDRs 1, 2, and 3 of SEQ ID NO: 74 and a VH region in which the full set of VH CDRs 1, 2, and 3 (combined) is identical to the VH CDRs 1, 2, and 3 of SEQ ID NO: 231, wherein the VL CDRs 1, 2, and 3 and the VH CDRs 1, 2, and 3 are defined by any one of Kabat, Chothia, or IGMT. In some embodiments, the VL CDRs 1, 2, and 3 and the VH CDRs 1, 2, and 3 are defined by Kabat. In some embodiments, the VL CDRs 1, 2, and 3 and the VH CDRs 1, 2, and 3 are defined by Chothia. In some embodiments, the VL CDRs 1, 2, and 3 and the VH CDRs 1, 2, and 3 are defined by IGMT.

[1142] In some embodiments, the antigen-binding protein (e.g., the anti-GIPR antibody) comprises a CDRL1, a CDRL2, a CDRL3, a CDRH1, a CDRH2, and a CDRH3, wherein the CDRL1, the CDRL2, the CDRL3, the CDRH1, the CDRH2, and the CDRH3 comprise amino acid sequences selected from:
[1143] i. SEQ ID NO: 629, SEQ ID NO: 786, SEQ ID NO: 943, SEQ ID NO: 1100, SEQ ID NO: 1257, and SEQ ID NO: 1414, respectively;
[1144] ii. SEQ ID NO: 630, SEQ ID NO: 787, SEQ ID NO: 944, SEQ ID NO: 1101, SEQ ID NO: 1258, and SEQ ID NO: 1415, respectively;
[1145] iii. SEQ ID NO: 631, SEQ ID NO: 788, SEQ ID NO: 945, SEQ ID NO: 1102, SEQ ID NO: 1259, and SEQ ID NO: 1416, respectively;
[1146] iv. SEQ ID NO: 632, SEQ ID NO: 789, SEQ ID NO: 946, SEQ ID NO: 1103, SEQ ID NO: 1260, and SEQ ID NO: 1417, respectively;
[1147] v. SEQ ID NO: 633, SEQ ID NO: 790, SEQ ID NO: 947, SEQ ID NO: 1104, SEQ ID NO: 1261, and SEQ ID NO: 1418, respectively;
[1148] vi. SEQ ID NO: 634, SEQ ID NO: 791, SEQ ID NO: 948, SEQ ID NO: 1105, SEQ ID NO: 1262, and SEQ ID NO: 1419, respectively;
[1149] vii. SEQ ID NO: 635, SEQ ID NO: 792, SEQ ID NO: 949, SEQ ID NO: 1106, SEQ ID NO: 1263, and SEQ ID NO: 1420, respectively;
[1150] viii. SEQ ID NO: 636, SEQ ID NO: 793, SEQ ID NO: 950, SEQ ID NO: 1107, SEQ ID NO: 1264, and SEQ ID NO: 1421, respectively;
[1151] ix. SEQ ID NO: 637, SEQ ID NO: 794, SEQ ID NO: 951, SEQ ID NO: 1108, SEQ ID NO: 1265, and SEQ ID NO: 1422, respectively;
[1152] x. SEQ ID NO: 638, SEQ ID NO: 795, SEQ ID NO: 952, SEQ ID NO: 1109, SEQ ID NO: 1266, and SEQ ID NO: 1423, respectively;
[1153] xi. SEQ ID NO: 639, SEQ ID NO: 796, SEQ ID NO: 953, SEQ ID NO: 1110, SEQ ID NO: 1267, and SEQ ID NO: 1424, respectively;
[1154] xii. SEQ ID NO: 640, SEQ ID NO: 797, SEQ ID NO: 954, SEQ ID NO: 1111, SEQ ID NO: 1268, and SEQ ID NO: 1425, respectively;
[1155] xiii. SEQ ID NO: 641, SEQ ID NO: 798, SEQ ID NO: 955, SEQ ID NO: 1112, SEQ ID NO: 1269, and SEQ ID NO: 1426, respectively;
[1156] xiv. SEQ ID NO: 642, SEQ ID NO: 799, SEQ ID NO: 956, SEQ ID NO: 1113, SEQ ID NO: 1270, and SEQ ID NO: 1427, respectively;
[1157] xv. SEQ ID NO: 643, SEQ ID NO: 800, SEQ ID NO: 957, SEQ ID NO: 1114, SEQ ID NO: 1271, and SEQ ID NO: 1428, respectively;
[1158] xvi. SEQ ID NO: 644, SEQ ID NO: 801, SEQ ID NO: 958, SEQ ID NO: 1115, SEQ ID NO: 1272, and SEQ ID NO: 1429, respectively;
[1159] xvii. SEQ ID NO: 645, SEQ ID NO: 802, SEQ ID NO: 959, SEQ ID NO: 1116, SEQ ID NO: 1273, and SEQ ID NO: 1430, respectively;
[1160] xviii. SEQ ID NO: 646, SEQ ID NO: 803, SEQ ID NO: 960, SEQ ID NO: 1117, SEQ ID NO: 1274, and SEQ ID NO: 1431, respectively;
[1161] xix. SEQ ID NO: 647, SEQ ID NO: 804, SEQ ID NO: 961, SEQ ID NO: 1118, SEQ ID NO: 1275, and SEQ ID NO: 1432, respectively;
[1162] xx. SEQ ID NO: 648, SEQ ID NO: 805, SEQ ID NO: 962, SEQ ID NO: 1119, SEQ ID NO: 1276, and SEQ ID NO: 1433, respectively;
[1163] xxi. SEQ ID NO: 649, SEQ ID NO: 806, SEQ ID NO: 963, SEQ ID NO: 1120, SEQ ID NO: 1277, and SEQ ID NO: 1434, respectively;
[1164] xxii. SEQ ID NO: 650, SEQ ID NO: 807, SEQ ID NO: 964, SEQ ID NO: 1121, SEQ ID NO: 1278, and SEQ ID NO: 1435, respectively;
[1165] xxiii. SEQ ID NO: 651, SEQ ID NO: 808, SEQ ID NO: 965, SEQ ID NO: 1122, SEQ ID NO: 1279, and SEQ ID NO: 1436, respectively;
[1166] xxiv. SEQ ID NO: 652, SEQ ID NO: 809, SEQ ID NO: 966, SEQ ID NO: 1123, SEQ ID NO: 1280, and SEQ ID NO: 1437, respectively;
[1167] xxv. SEQ ID NO: 653, SEQ ID NO: 810, SEQ ID NO: 967, SEQ ID NO: 1124, SEQ ID NO: 1281, and SEQ ID NO: 1438, respectively;
[1168] xxvi. SEQ ID NO: 654, SEQ ID NO: 811, SEQ ID NO: 968, SEQ ID NO: 1125, SEQ ID NO: 1282, and SEQ ID NO: 1439, respectively;
[1169] xxvii. SEQ ID NO: 655, SEQ ID NO: 812, SEQ ID NO: 969, SEQ ID NO: 1126, SEQ ID NO: 1283, and SEQ ID NO: 1440, respectively;
[1170] xxviii. SEQ ID NO: 656, SEQ ID NO: 813, SEQ ID NO: 970, SEQ ID NO: 1127, SEQ ID NO: 1284, and SEQ ID NO: 1441, respectively;
[1171] xxix. SEQ ID NO: 657, SEQ ID NO: 814, SEQ ID NO: 971, SEQ ID NO: 1128, SEQ ID NO: 1285, and SEQ ID NO: 1442, respectively;
[1172] xxx. SEQ ID NO: 658, SEQ ID NO: 815, SEQ ID NO: 972, SEQ ID NO: 1129, SEQ ID NO: 1286, and SEQ ID NO: 1443, respectively;
[1173] xxxi. SEQ ID NO: 659, SEQ ID NO: 816, SEQ ID NO: 973, SEQ ID NO: 1130, SEQ ID NO: 1287, and SEQ ID NO: 1444, respectively;
[1174] xxxii. SEQ ID NO: 660, SEQ ID NO: 817, SEQ ID NO: 974, SEQ ID NO: 1131, SEQ ID NO: 1288, and SEQ ID NO: 1445, respectively;
[1175] xxxiii. SEQ ID NO: 661, SEQ ID NO: 818, SEQ ID NO: 975, SEQ ID NO: 1132, SEQ ID NO: 1289, and SEQ ID NO: 1446, respectively;
[1176] xxxiv. SEQ ID NO: 662, SEQ ID NO: 819, SEQ ID NO: 976, SEQ ID NO: 1133, SEQ ID NO: 1290, and SEQ ID NO: 1447, respectively;
[1177] xxxv. SEQ ID NO: 663, SEQ ID NO: 820, SEQ ID NO: 977, SEQ ID NO: 1134, SEQ ID NO: 1291, and SEQ ID NO: 1448, respectively;
[1178] xxxvi. SEQ ID NO: 664, SEQ ID NO: 821, SEQ ID NO: 978, SEQ ID NO: 1135, SEQ ID NO: 1292, and SEQ ID NO: 1449, respectively;
[1179] xxxvii. SEQ ID NO: 665, SEQ ID NO: 822, SEQ ID NO: 979, SEQ ID NO: 1136, SEQ ID NO: 1293, and SEQ ID NO: 1450, respectively;
[1180] xxxviii. SEQ ID NO: 666, SEQ ID NO: 823, SEQ ID NO: 980, SEQ ID NO: 1137, SEQ ID NO: 1294, and SEQ ID NO: 1451, respectively;
[1181] xxxix. SEQ ID NO: 667, SEQ ID NO: 824, SEQ ID NO: 981, SEQ ID NO: 1138, SEQ ID NO: 1295, and SEQ ID NO: 1452, respectively;
[1182] xl. SEQ ID NO: 668, SEQ ID NO: 825, SEQ ID NO: 982, SEQ ID NO: 1139, SEQ ID NO: 1296, and SEQ ID NO: 1453, respectively;
[1183] xli. SEQ ID NO: 669, SEQ ID NO: 826, SEQ ID NO: 983, SEQ ID NO: 1140, SEQ ID NO: 1297, and SEQ ID NO: 1454, respectively;
[1184] xlii. SEQ ID NO: 670, SEQ ID NO: 827, SEQ ID NO: 984, SEQ ID NO: 1141, SEQ ID NO: 1298, and SEQ ID NO: 1455, respectively;
[1185] xliii. SEQ ID NO: 671, SEQ ID NO: 828, SEQ ID NO: 985, SEQ ID NO: 1142, SEQ ID NO: 1299, and SEQ ID NO: 1456, respectively;
[1186] xliv. SEQ ID NO: 672, SEQ ID NO: 829, SEQ ID NO: 986, SEQ ID NO: 1143, SEQ ID NO: 1300, and SEQ ID NO: 1457, respectively;
[1187] xlv. SEQ ID NO: 673, SEQ ID NO: 830, SEQ ID NO: 987, SEQ ID NO: 1144, SEQ ID NO: 1301, and SEQ ID NO: 1458, respectively;
[1188] xlvi. SEQ ID NO: 674, SEQ ID NO: 831, SEQ ID NO: 988, SEQ ID NO: 1145, SEQ ID NO: 1302, and SEQ ID NO: 1459, respectively;
[1189] xlvii. SEQ ID NO: 675, SEQ ID NO: 832, SEQ ID NO: 989, SEQ ID NO: 1146, SEQ ID NO: 1303, and SEQ ID NO: 1460, respectively;
[1190] xlviii. SEQ ID NO: 676, SEQ ID NO: 833, SEQ ID NO: 990, SEQ ID NO: 1147, SEQ ID NO: 1304, and SEQ ID NO: 1461, respectively;
[1191] xlix. SEQ ID NO: 677, SEQ ID NO: 834, SEQ ID NO: 991, SEQ ID NO: 1148, SEQ ID NO: 1305, and SEQ ID NO: 1462, respectively;
[1192] l. SEQ ID NO: 678, SEQ ID NO: 835, SEQ ID NO: 992, SEQ ID NO: 1149, SEQ ID NO: 1306, and SEQ ID NO: 1463, respectively;
[1193] li. SEQ ID NO: 679, SEQ ID NO: 836, SEQ ID NO: 993, SEQ ID NO: 1150, SEQ ID NO: 1307, and SEQ ID NO: 1464, respectively;
[1194] lii. SEQ ID NO: 680, SEQ ID NO: 837, SEQ ID NO: 994, SEQ ID NO: 1151, SEQ ID NO: 1308, and SEQ ID NO: 1465, respectively;
[1195] liii. SEQ ID NO: 681, SEQ ID NO: 838, SEQ ID NO: 995, SEQ ID NO: 1152, SEQ ID NO: 1309, and SEQ ID NO: 1466, respectively;
[1196] liv. SEQ ID NO: 682, SEQ ID NO: 839, SEQ ID NO: 996, SEQ ID NO: 1153, SEQ ID NO: 1310, and SEQ ID NO: 1467, respectively;
[1197] lv. SEQ ID NO: 683, SEQ ID NO: 840, SEQ ID NO: 997, SEQ ID NO: 1154, SEQ ID NO: 1311, and SEQ ID NO: 1468, respectively;
[1198] lvi. SEQ ID NO: 684, SEQ ID NO: 841, SEQ ID NO: 998, SEQ ID NO: 1155, SEQ ID NO: 1312, and SEQ ID NO: 1469, respectively;
[1199] lvii. SEQ ID NO: 685, SEQ ID NO: 842, SEQ ID NO: 999, SEQ ID NO: 1156, SEQ ID NO: 1313, and SEQ ID NO: 1470, respectively;
[1200] lviii. SEQ ID NO: 686, SEQ ID NO: 843, SEQ ID NO: 1000, SEQ ID NO: 1157, SEQ ID NO: 1314, and SEQ ID NO: 1471, respectively;
[1201] lix. SEQ ID NO: 687, SEQ ID NO: 844, SEQ ID NO: 1001, SEQ ID NO: 1158, SEQ ID NO: 1315, and SEQ ID NO: 1472, respectively;
[1202] lx. SEQ ID NO: 688, SEQ ID NO: 845, SEQ ID NO: 1002, SEQ ID NO: 1159, SEQ ID NO: 1316, and SEQ ID NO: 1473, respectively;
[1203] lxi. SEQ ID NO: 689, SEQ ID NO: 846, SEQ ID NO: 1003, SEQ ID NO: 1160, SEQ ID NO: 1317, and SEQ ID NO: 1474, respectively;
[1204] lxii. SEQ ID NO: 690, SEQ ID NO: 847, SEQ ID NO: 1004, SEQ ID NO: 1161, SEQ ID NO: 1318, and SEQ ID NO: 1475, respectively;
[1205] lxiii. SEQ ID NO: 691, SEQ ID NO: 848, SEQ ID NO: 1005, SEQ ID NO: 1162, SEQ ID NO: 1319, and SEQ ID NO: 1476, respectively;
[1206] lxiv. SEQ ID NO: 692, SEQ ID NO: 849, SEQ ID NO: 1006, SEQ ID NO: 1163, SEQ ID NO: 1320, and SEQ ID NO: 1477, respectively;
[1207] lxv. SEQ ID NO: 693, SEQ ID NO: 850, SEQ ID NO: 1007, SEQ ID NO: 1164, SEQ ID NO: 1321, and SEQ ID NO: 1478, respectively;
[1208] lxvi. SEQ ID NO: 694, SEQ ID NO: 851, SEQ ID NO: 1008, SEQ ID NO: 1165, SEQ ID NO: 1322, and SEQ ID NO: 1479, respectively;
[1209] lxvii. SEQ ID NO: 695, SEQ ID NO: 852, SEQ ID NO: 1009, SEQ ID NO: 1166, SEQ ID NO: 1323, and SEQ ID NO: 1480, respectively;
[1210] lxviii. SEQ ID NO: 696, SEQ ID NO: 853, SEQ ID NO: 1010, SEQ ID NO: 1167, SEQ ID NO: 1324, and SEQ ID NO: 1481, respectively;
[1211] lxix. SEQ ID NO: 697, SEQ ID NO: 854, SEQ ID NO: 1011, SEQ ID NO: 1168, SEQ ID NO: 1325, and SEQ ID NO: 1482, respectively;
[1212] lxx. SEQ ID NO: 698, SEQ ID NO: 855, SEQ ID NO: 1012, SEQ ID NO: 1169, SEQ ID NO: 1326, and SEQ ID NO: 1483, respectively;
[1213] lxxi. SEQ ID NO: 699, SEQ ID NO: 856, SEQ ID NO: 1013, SEQ ID NO: 1170, SEQ ID NO: 1327, and SEQ ID NO: 1484, respectively;
[1214] lxxii. SEQ ID NO: 700, SEQ ID NO: 857, SEQ ID NO: 1014, SEQ ID NO: 1171, SEQ ID NO: 1328, and SEQ ID NO: 1485, respectively;
[1215] lxxiii. SEQ ID NO: 701, SEQ ID NO: 858, SEQ ID NO: 1015, SEQ ID NO: 1172, SEQ ID NO: 1329, and SEQ ID NO: 1486, respectively;
[1216] lxxiv. SEQ ID NO: 702, SEQ ID NO: 859, SEQ ID NO: 1016, SEQ ID NO: 1173, SEQ ID NO: 1330, and SEQ ID NO: 1487, respectively;
[1217] lxxv. SEQ ID NO: 703, SEQ ID NO: 860, SEQ ID NO: 1017, SEQ ID NO: 1174, SEQ ID NO: 1331, and SEQ ID NO: 1488, respectively;
[1218] lxxvi. SEQ ID NO: 704, SEQ ID NO: 861, SEQ ID NO: 1018, SEQ ID NO: 1175, SEQ ID NO: 1332, and SEQ ID NO: 1489, respectively;
[1219] lxxvii. SEQ ID NO: 705, SEQ ID NO: 862, SEQ ID NO: 1019, SEQ ID NO: 1176, SEQ ID NO: 1333, and SEQ ID NO: 1490, respectively;
[1220] lxxviii. SEQ ID NO: 706, SEQ ID NO: 863, SEQ ID NO: 1020, SEQ ID NO: 1177, SEQ ID NO: 1334, and SEQ ID NO: 1491, respectively;
[1221] lxxix. SEQ ID NO: 707, SEQ ID NO: 864, SEQ ID NO: 1021, SEQ ID NO: 1178, SEQ ID NO: 1335, and SEQ ID NO: 1492, respectively;
[1222] lxxx. SEQ ID NO: 708, SEQ ID NO: 865, SEQ ID NO: 1022, SEQ ID NO: 1179, SEQ ID NO: 1336, and SEQ ID NO: 1493, respectively;
[1223] lxxxi. SEQ ID NO: 709, SEQ ID NO: 866, SEQ ID NO: 1023, SEQ ID NO: 1180, SEQ ID NO: 1337, and SEQ ID NO: 1494, respectively;
[1224] lxxxii. SEQ ID NO: 710, SEQ ID NO: 867, SEQ ID NO: 1024, SEQ ID NO: 1181, SEQ ID NO: 1338, and SEQ ID NO: 1495, respectively;
[1225] lxxxiii. SEQ ID NO: 711, SEQ ID NO: 868, SEQ ID NO: 1025, SEQ ID NO: 1182, SEQ ID NO: 1339, and SEQ ID NO: 1496, respectively;
[1226] lxxxiv. SEQ ID NO: 712, SEQ ID NO: 869, SEQ ID NO: 1026, SEQ ID NO: 1183, SEQ ID NO: 1340, and SEQ ID NO: 1497, respectively;
[1227] lxxxv. SEQ ID NO: 713, SEQ ID NO: 870, SEQ ID NO: 1027, SEQ ID NO: 1184, SEQ ID NO: 1341, and SEQ ID NO: 1498, respectively;
[1228] lxxxvi. SEQ ID NO: 714, SEQ ID NO: 871, SEQ ID NO: 1028, SEQ ID NO: 1185, SEQ ID NO: 1342, and SEQ ID NO: 1499, respectively;
[1229] lxxxvii. SEQ ID NO: 715, SEQ ID NO: 872, SEQ ID NO: 1029, SEQ ID NO: 1186, SEQ ID NO: 1343, and SEQ ID NO: 1500, respectively;
[1230] lxxxviii. SEQ ID NO: 716, SEQ ID NO: 873, SEQ ID NO: 1030, SEQ ID NO: 1187, SEQ ID NO: 1344, and SEQ ID NO: 1501, respectively;
[1231] lxxxix. SEQ ID NO: 717, SEQ ID NO: 874, SEQ ID NO: 1031, SEQ ID NO: 1188, SEQ ID NO: 1345, and SEQ ID NO: 1502, respectively;
[1232] xc. SEQ ID NO: 718, SEQ ID NO: 875, SEQ ID NO: 1032, SEQ ID NO: 1189, SEQ ID NO: 1346, and SEQ ID NO: 1503, respectively;
[1233] xci. SEQ ID NO: 719, SEQ ID NO: 876, SEQ ID NO: 1033, SEQ ID NO: 1190, SEQ ID NO: 1347, and SEQ ID NO: 1504, respectively;
[1234] xcii. SEQ ID NO: 720, SEQ ID NO: 877, SEQ ID NO: 1034, SEQ ID NO: 1191, SEQ ID NO: 1348, and SEQ ID NO: 1505, respectively;
[1235] xciii. SEQ ID NO: 721, SEQ ID NO: 878, SEQ ID NO: 1035, SEQ ID NO: 1192, SEQ ID NO: 1349, and SEQ ID NO: 1506, respectively;
[1236] xciv. SEQ ID NO: 722, SEQ ID NO: 879, SEQ ID NO: 1036, SEQ ID NO: 1193, SEQ ID NO: 1350, and SEQ ID NO: 1507, respectively;
[1237] xcv. SEQ ID NO: 723, SEQ ID NO: 880, SEQ ID NO: 1037, SEQ ID NO: 1194, SEQ ID NO: 1351, and SEQ ID NO: 1508, respectively;
[1238] xcvi. SEQ ID NO: 724, SEQ ID NO: 881, SEQ ID NO: 1038, SEQ ID NO: 1195, SEQ ID NO: 1352, and SEQ ID NO: 1509, respectively;
[1239] xcvii. SEQ ID NO: 725, SEQ ID NO: 882, SEQ ID NO: 1039, SEQ ID NO: 1196, SEQ ID NO: 1353, and SEQ ID NO: 1510, respectively;
[1240] xcviii. SEQ ID NO: 726, SEQ ID NO: 883, SEQ ID NO: 1040, SEQ ID NO: 1197, SEQ ID NO: 1354, and SEQ ID NO: 1511, respectively;
[1241] xcix. SEQ ID NO: 727, SEQ ID NO: 884, SEQ ID NO: 1041, SEQ ID NO: 1198, SEQ ID NO: 1355, and SEQ ID NO: 1512, respectively;
[1242] c. SEQ ID NO: 728, SEQ ID NO: 885, SEQ ID NO: 1042, SEQ ID NO: 1199, SEQ ID NO: 1356, and SEQ ID NO: 1513, respectively;
[1243] ci. SEQ ID NO: 729, SEQ ID NO: 886, SEQ ID NO: 1043, SEQ ID NO: 1200, SEQ ID NO: 1357, and SEQ ID NO: 1514, respectively;
[1244] cii. SEQ ID NO: 730, SEQ ID NO: 887, SEQ ID NO: 1044, SEQ ID NO: 1201, SEQ ID NO: 1358, and SEQ ID NO: 1515, respectively;
[1245] ciii. SEQ ID NO: 731, SEQ ID NO: 888, SEQ ID NO: 1045, SEQ ID NO: 1202, SEQ ID NO: 1359, and SEQ ID NO: 1516, respectively;
[1246] civ. SEQ ID NO: 732, SEQ ID NO: 889, SEQ ID NO: 1046, SEQ ID NO: 1203, SEQ ID NO: 1360, and SEQ ID NO: 1517, respectively;
[1247] cv. SEQ ID NO: 733, SEQ ID NO: 890, SEQ ID NO: 1047, SEQ ID NO: 1204, SEQ ID NO: 1361, and SEQ ID NO: 1518, respectively;
[1248] cvi. SEQ ID NO: 734, SEQ ID NO: 891, SEQ ID NO: 1048, SEQ ID NO: 1205, SEQ ID NO: 1362, and SEQ ID NO: 1519, respectively;
[1249] cvii. SEQ ID NO: 735, SEQ ID NO: 892, SEQ ID NO: 1049, SEQ ID NO: 1206, SEQ ID NO: 1363, and SEQ ID NO: 1520, respectively;
[1250] cviii. SEQ ID NO: 736, SEQ ID NO: 893, SEQ ID NO: 1050, SEQ ID NO: 1207, SEQ ID NO: 1364, and SEQ ID NO: 1521, respectively;
[1251] cix. SEQ ID NO: 737, SEQ ID NO: 894, SEQ ID NO: 1051, SEQ ID NO: 1208, SEQ ID NO: 1365, and SEQ ID NO: 1522, respectively;
[1252] cx. SEQ ID NO: 738, SEQ ID NO: 895, SEQ ID NO: 1052, SEQ ID NO: 1209, SEQ ID NO: 1366, and SEQ ID NO: 1523, respectively;
[1253] cxi. SEQ ID NO: 739, SEQ ID NO: 896, SEQ ID NO: 1053, SEQ ID NO: 1210, SEQ ID NO: 1367, and SEQ ID NO: 1524, respectively;
[1254] cxii. SEQ ID NO: 740, SEQ ID NO: 897, SEQ ID NO: 1054, SEQ ID NO: 1211, SEQ ID NO: 1368, and SEQ ID NO: 1525, respectively;
[1255] cxiii. SEQ ID NO: 741, SEQ ID NO: 898, SEQ ID NO: 1055, SEQ ID NO: 1212, SEQ ID NO: 1369, and SEQ ID NO: 1526, respectively;
[1256] cxiv. SEQ ID NO: 742, SEQ ID NO: 899, SEQ ID NO: 1056, SEQ ID NO: 1213, SEQ ID NO: 1370, and SEQ ID NO: 1527, respectively;
[1257] cxv. SEQ ID NO: 743, SEQ ID NO: 900, SEQ ID NO: 1057, SEQ ID NO: 1214, SEQ ID NO: 1371, and SEQ ID NO: 1528, respectively;
[1258] cxvi. SEQ ID NO: 744, SEQ ID NO: 901, SEQ ID NO: 1058, SEQ ID NO: 1215, SEQ ID NO: 1372, and SEQ ID NO: 1529, respectively;
[1259] cxvii. SEQ ID NO: 745, SEQ ID NO: 902, SEQ ID NO: 1059, SEQ ID NO: 1216, SEQ ID NO: 1373, and SEQ ID NO: 1530, respectively;
[1260] cxviii. SEQ ID NO: 746, SEQ ID NO: 903, SEQ ID NO: 1060, SEQ ID NO: 1217, SEQ ID NO: 1374, and SEQ ID NO: 1531, respectively;
[1261] cxix. SEQ ID NO: 747, SEQ ID NO: 904, SEQ ID NO: 1061, SEQ ID NO: 1218, SEQ ID NO: 1375, and SEQ ID NO: 1532, respectively;
[1262] cxx. SEQ ID NO: 748, SEQ ID NO: 905, SEQ ID NO: 1062, SEQ ID NO: 1219, SEQ ID NO: 1376, and SEQ ID NO: 1533, respectively;
[1263] cxxi. SEQ ID NO: 749, SEQ ID NO: 906, SEQ ID NO: 1063, SEQ ID NO: 1220, SEQ ID NO: 1377, and SEQ ID NO: 1534, respectively;
[1264] cxxii. SEQ ID NO: 750, SEQ ID NO: 907, SEQ ID NO: 1064, SEQ ID NO: 1221, SEQ ID NO: 1378, and SEQ ID NO: 1535, respectively;
[1265] cxxiii. SEQ ID NO: 751, SEQ ID NO: 908, SEQ ID NO: 1065, SEQ ID NO: 1222, SEQ ID NO: 1379, and SEQ ID NO: 1536, respectively;
[1266] cxxiv. SEQ ID NO: 752, SEQ ID NO: 909, SEQ ID NO: 1066, SEQ ID NO: 1223, SEQ ID NO: 1380, and SEQ ID NO: 1537, respectively;
[1267] cxxv. SEQ ID NO: 753, SEQ ID NO: 910, SEQ ID NO: 1067, SEQ ID NO: 1224, SEQ ID NO: 1381, and SEQ ID NO: 1538, respectively;
[1268] cxxvi. SEQ ID NO: 754, SEQ ID NO: 911, SEQ ID NO: 1068, SEQ ID NO: 1225, SEQ ID NO: 1382, and SEQ ID NO: 1539, respectively;
[1269] cxxvii. SEQ ID NO: 755, SEQ ID NO: 912, SEQ ID NO: 1069, SEQ ID NO: 1226, SEQ ID NO: 1383, and SEQ ID NO: 1540, respectively;
[1270] cxxviii. SEQ ID NO: 756, SEQ ID NO: 913, SEQ ID NO: 1070, SEQ ID NO: 1227, SEQ ID NO: 1384, and SEQ ID NO: 1541, respectively;
[1271] cxxix. SEQ ID NO: 757, SEQ ID NO: 914, SEQ ID NO: 1071, SEQ ID NO: 1228, SEQ ID NO: 1385, and SEQ ID NO: 1542, respectively;
[1272] cxxx. SEQ ID NO: 758, SEQ ID NO: 915, SEQ ID NO: 1072, SEQ ID NO: 1229, SEQ ID NO: 1386, and SEQ ID NO: 1543, respectively;
[1273] cxxxi. SEQ ID NO: 759, SEQ ID NO: 916, SEQ ID NO: 1073, SEQ ID NO: 1230, SEQ ID NO: 1387, and SEQ ID NO: 1544, respectively;
[1274] cxxxii. SEQ ID NO: 760, SEQ ID NO: 917, SEQ ID NO: 1074, SEQ ID NO: 1231, SEQ ID NO: 1388, and SEQ ID NO: 1545, respectively;
[1275] cxxxiii. SEQ ID NO: 761, SEQ ID NO: 918, SEQ ID NO: 1075, SEQ ID NO: 1232, SEQ ID NO: 1389, and SEQ ID NO: 1546, respectively;
[1276] cxxxiv. SEQ ID NO: 762, SEQ ID NO: 919, SEQ ID NO: 1076, SEQ ID NO: 1233, SEQ ID NO: 1390, and SEQ ID NO: 1547, respectively;
[1277] cxxxv. SEQ ID NO: 763, SEQ ID NO: 920, SEQ ID NO: 1077, SEQ ID NO: 1234, SEQ ID NO: 1391, and SEQ ID NO: 1548, respectively;
[1278] cxxxvi. SEQ ID NO: 764, SEQ ID NO: 921, SEQ ID NO: 1078, SEQ ID NO: 1235, SEQ ID NO: 1392, and SEQ ID NO: 1549, respectively;
[1279] cxxxvii. SEQ ID NO: 765, SEQ ID NO: 922, SEQ ID NO: 1079, SEQ ID NO: 1236, SEQ ID NO: 1393, and SEQ ID NO: 1550, respectively;
[1280] cxxxviii. SEQ ID NO: 766, SEQ ID NO: 923, SEQ ID NO: 1080, SEQ ID NO: 1237, SEQ ID NO: 1394, and SEQ ID NO: 1551, respectively;
[1281] cxxxix. SEQ ID NO: 767, SEQ ID NO: 924, SEQ ID NO: 1081, SEQ ID NO: 1238, SEQ ID NO: 1395, and SEQ ID NO: 1552, respectively;
[1282] cxl. SEQ ID NO: 768, SEQ ID NO: 925, SEQ ID NO: 1082, SEQ ID NO: 1239, SEQ ID NO: 1396, and SEQ ID NO: 1553, respectively;
[1283] cxli. SEQ ID NO: 769, SEQ ID NO: 926, SEQ ID NO: 1083, SEQ ID NO: 1240, SEQ ID NO: 1397, and SEQ ID NO: 1554, respectively;
[1284] cxlii. SEQ ID NO: 770, SEQ ID NO: 927, SEQ ID NO: 1084, SEQ ID NO: 1241, SEQ ID NO: 1398, and SEQ ID NO: 1555, respectively;
[1285] cxliii. SEQ ID NO: 771, SEQ ID NO: 928, SEQ ID NO: 1085, SEQ ID NO: 1242, SEQ ID NO: 1399, and SEQ ID NO: 1556, respectively;
[1286] cxliv. SEQ ID NO: 772, SEQ ID NO: 929, SEQ ID NO: 1086, SEQ ID NO: 1243, SEQ ID NO: 1400, and SEQ ID NO: 1557, respectively;
[1287] cxlv. SEQ ID NO: 773, SEQ ID NO: 930, SEQ ID NO: 1087, SEQ ID NO: 1244, SEQ ID NO: 1401, and SEQ ID NO: 1558, respectively;
[1288] cxlvi. SEQ ID NO: 774, SEQ ID NO: 931, SEQ ID NO: 1088, SEQ ID NO: 1245, SEQ ID NO: 1402, and SEQ ID NO: 1559, respectively;
[1289] cxlvii. SEQ ID NO: 775, SEQ ID NO: 932, SEQ ID NO: 1089, SEQ ID NO: 1246, SEQ ID NO: 1403, and SEQ ID NO: 1560, respectively;
[1290] cxlviii. SEQ ID NO: 776, SEQ ID NO: 933, SEQ ID NO: 1090, SEQ ID NO: 1247, SEQ ID NO: 1404, and SEQ ID NO: 1561, respectively;
[1291] cxlix. SEQ ID NO: 777, SEQ ID NO: 934, SEQ ID NO: 1091, SEQ ID NO: 1248, SEQ ID NO: 1405, and SEQ ID NO: 1562, respectively;
[1292] cl. SEQ ID NO: 778, SEQ ID NO: 935, SEQ ID NO: 1092, SEQ ID NO: 1249, SEQ ID NO: 1406, and SEQ ID NO: 1563, respectively;
[1293] cli. SEQ ID NO: 779, SEQ ID NO: 936, SEQ ID NO: 1093, SEQ ID NO: 1250, SEQ ID NO: 1407, and SEQ ID NO: 1564, respectively;
[1294] clii. SEQ ID NO: 780, SEQ ID NO: 937, SEQ ID NO: 1094, SEQ ID NO: 1251, SEQ ID NO: 1408, and SEQ ID NO: 1565, respectively;
[1295] cliii. SEQ ID NO: 781, SEQ ID NO: 938, SEQ ID NO: 1095, SEQ ID NO: 1252, SEQ ID NO: 1409, and SEQ ID NO: 1566, respectively;
[1296] cliv. SEQ ID NO: 782, SEQ ID NO: 939, SEQ ID NO: 1096, SEQ ID NO: 1253, SEQ ID NO: 1410, and SEQ ID NO: 1567, respectively;
[1297] clv. SEQ ID NO: 783, SEQ ID NO: 940, SEQ ID NO: 1097, SEQ ID NO: 1254, SEQ ID NO: 1411, and SEQ ID NO: 1568, respectively;
[1298] clvi. SEQ ID NO: 784, SEQ ID NO: 941, SEQ ID NO: 1098, SEQ ID NO: 1255, SEQ ID NO: 1412, and SEQ ID NO: 1569, respectively; and
[1299] clvii. SEQ ID NO: 785, SEQ ID NO: 942, SEQ ID NO: 1099, SEQ ID NO: 1256, SEQ ID NO: 1413, and SEQ ID NO: 1570, respectively,
[1300] preferably wherein the CDRL1, the CDRL2, the CDRL3, the CDRH1, the CDRH2, and the CDRH3 comprise the amino acid sequences of SEQ ID NO: 702, SEQ ID NO: 859, SEQ ID NO: 1016, SEQ ID NO: 1173, SEQ ID NO: 1330, and SEQ ID NO: 1487, respectively.

[1301] In some embodiments, the antigen-binding protein is an antibody comprising at least one cysteine conjugation site at a position selected from the group consisting of 88 (e.g., D88) of the light chain, 384 (e.g., E384) of the heavy chain, and 487 (e.g., T487) of the heavy chain, all according to AHo numbering.

[1302] In some embodiments, the antigen-binding protein (e.g., the anti-GIPR antibody) comprises a full-length light chain and a full-length heavy chain as listed in one of the rows for one of the antibodies listed in Tables 9, 14, and 15.

[1303] In some embodiments, the antigen-binding protein (e.g., the anti-GIPR antibody) comprises a full-length light chain and a full-length heavy chain as listed in one of the rows for one of the antibodies listed in Tables 9, 14, and 15, except that one or both of the chains differs from the amino acid sequence specified in the table at only 1, 2, 3, 4, 5, 6, 7, 8, 9, 10, 11, 12, 13, 14, or 15 amino acid residues, wherein each such sequence difference is independently a single amino acid deletion, insertion, or substitution, with the deletions, insertions, and/or substitutions resulting in no more than 1, 2, 3, 4, 5, 6, 7, 8, 9, 10, 11, 12, 13, 14 or 15 amino acid changes relative to the full-length sequences specified in Tables 14 and 15.

[1304] In some embodiments, the antigen-binding protein (e.g., the anti-GIPR antibody) comprises a full-length light chain and/or a full-length heavy chain from Table 14 or Table 15, respectively, with the N-terminal methionine deleted.

[1305] In some embodiments, the antigen-binding protein (e.g., the anti-GIPR antibody) comprises a full-length light chain and/or a full length heavy chain from Table 14 or Table 15, respectively with the C-terminal lysine deleted.

[1306] In some embodiments, the antigen-binding protein (e.g., the anti-GIPR antibody) comprises a full-length light chain and a full-length heavy chain as listed in one of the rows for one of the antibodies listed in Tables 9, 14, and 15, except that one or both of the chains differs from the amino acid sequence specified in Tables 14 and 15 in that the light chain and/or heavy chain comprises or consists of a sequence of amino acids that has at least 70%, at least 75%, at least 80%, at least 85%, at least 90%, at least 95%, at least 96%, at least 97%, at least 98%, or at least 99% sequence identity to the amino acid sequences of the light chain or heavy chain sequences as specified in Table 14 or Table 15, respectively.

[1307] In some embodiments, the antigen-binding protein (e.g., the anti-GIPR antibody) consists of a just a light or a heavy chain polypeptide as set forth in Table 14 or Table 15, respectively.

[1308] In some embodiments, the antigen-binding protein is an antibody comprising a light chain comprising an amino acid sequence selected from the group consisting of SEQ ID NOs: 472-628 and a heavy chain comprising an amino acid sequence selected from the group consisting of SEQ ID NOs: 472-628. In some embodiments, the antibody comprises at least one cysteine conjugation site at a position selected from the group consisting of 88 (e.g., D88) of the light chain, 384 (e.g., E384) of the heavy chain, and 487 (e.g., T487) of the heavy chain, all according to AHo numbering.

[1309] In some embodiments, the antigen-binding protein (e.g., the anti-GIPR antibody) comprises a light chain and a heavy chain, wherein the light chain and heavy chain comprise amino acid sequences selected from:
[1310] i. SEQ ID NO: 315 and SEQ ID NO: 472, respectively;
[1311] ii. SEQ ID NO: 316 and SEQ ID NO: 473, respectively;
[1312] iii. SEQ ID NO: 317 and SEQ ID NO: 474, respectively;
[1313] iv. SEQ ID NO: 318 and SEQ ID NO: 475, respectively;
[1314] v. SEQ ID NO: 319 and SEQ ID NO: 476, respectively;
[1315] vi. SEQ ID NO: 320 and SEQ ID NO: 477, respectively;
[1316] vii. SEQ ID NO: 321 and SEQ ID NO: 478, respectively;
[1317] viii. SEQ ID NO: 322 and SEQ ID NO: 479, respectively;
[1318] ix. SEQ ID NO: 323 and SEQ ID NO: 480, respectively;
[1319] x. SEQ ID NO: 324 and SEQ ID NO: 481, respectively;
[1320] xi. SEQ ID NO: 325 and SEQ ID NO: 482, respectively;
[1321] xii. SEQ ID NO: 326 and SEQ ID NO: 483, respectively;
[1322] xiii. SEQ ID NO: 327 and SEQ ID NO: 484, respectively;
[1323] xiv. SEQ ID NO: 328 and SEQ ID NO: 485, respectively;
[1324] xv. SEQ ID NO: 329 and SEQ ID NO: 486, respectively;
[1325] xvi. SEQ ID NO: 330 and SEQ ID NO: 487, respectively;
[1326] xvii. SEQ ID NO: 331 and SEQ ID NO: 488, respectively;
[1327] xviii. SEQ ID NO: 332 and SEQ ID NO: 489, respectively;
[1328] xix. SEQ ID NO: 333 and SEQ ID NO: 490, respectively;
[1329] xx. SEQ ID NO: 334 and SEQ ID NO: 491, respectively;
[1330] xxi. SEQ ID NO: 335 and SEQ ID NO: 492, respectively;
[1331] xxii. SEQ ID NO: 336 and SEQ ID NO: 493, respectively;
[1332] xxiii. SEQ ID NO: 337 and SEQ ID NO: 494, respectively;
[1333] xxiv. SEQ ID NO: 338 and SEQ ID NO: 495, respectively;
[1334] xxv. SEQ ID NO: 339 and SEQ ID NO: 496, respectively;
[1335] xxvi. SEQ ID NO: 340 and SEQ ID NO: 497, respectively;
[1336] xxvii. SEQ ID NO: 341 and SEQ ID NO: 498, respectively;
[1337] xxviii. SEQ ID NO: 342 and SEQ ID NO: 499, respectively;
[1338] xxix. SEQ ID NO: 343 and SEQ ID NO: 500, respectively;
[1339] xxx. SEQ ID NO: 344 and SEQ ID NO: 501, respectively;
[1340] xxxi. SEQ ID NO: 345 and SEQ ID NO: 502, respectively;
[1341] xxxii. SEQ ID NO: 346 and SEQ ID NO: 503, respectively;
[1342] xxxiii. SEQ ID NO: 347 and SEQ ID NO: 504, respectively;
[1343] xxxiv. SEQ ID NO: 348 and SEQ ID NO: 505, respectively;
[1344] xxxv. SEQ ID NO: 349 and SEQ ID NO: 506, respectively;
[1345] xxxvi. SEQ ID NO: 350 and SEQ ID NO: 507, respectively;
[1346] xxxvii. SEQ ID NO: 351 and SEQ ID NO: 508, respectively;
[1347] xxxviii. SEQ ID NO: 352 and SEQ ID NO: 509, respectively;
[1348] xxxix. SEQ ID NO: 353 and SEQ ID NO: 510, respectively;
[1349] xl. SEQ ID NO: 354 and SEQ ID NO: 511, respectively;
[1350] xli. SEQ ID NO: 355 and SEQ ID NO: 512, respectively;
[1351] xlii. SEQ ID NO: 356 and SEQ ID NO: 513, respectively;
[1352] xliii. SEQ ID NO: 357 and SEQ ID NO: 514, respectively;
[1353] xliv. SEQ ID NO: 358 and SEQ ID NO: 515, respectively;
[1354] xlv. SEQ ID NO: 359 and SEQ ID NO: 516, respectively;
[1355] xlvi. SEQ ID NO: 360 and SEQ ID NO: 517, respectively;
[1356] xlvii. SEQ ID NO: 361 and SEQ ID NO: 518, respectively;
[1357] xlviii. SEQ ID NO: 362 and SEQ ID NO: 519, respectively;
[1358] xlix. SEQ ID NO: 363 and SEQ ID NO: 520, respectively;
[1359] l. SEQ ID NO: 364 and SEQ ID NO: 521, respectively;
[1360] li. SEQ ID NO: 365 and SEQ ID NO: 522, respectively;
[1361] lii. SEQ ID NO: 366 and SEQ ID NO: 523, respectively;
[1362] liii. SEQ ID NO: 367 and SEQ ID NO: 524, respectively;
[1363] liv. SEQ ID NO: 368 and SEQ ID NO: 525, respectively;
[1364] lv. SEQ ID NO: 369 and SEQ ID NO: 526, respectively;
[1365] lvi. SEQ ID NO: 370 and SEQ ID NO: 527, respectively;
[1366] lvii. SEQ ID NO: 371 and SEQ ID NO: 528, respectively;
[1367] lviii. SEQ ID NO: 372 and SEQ ID NO: 529, respectively;
[1368] lix. SEQ ID NO: 373 and SEQ ID NO: 530, respectively;
[1369] lx. SEQ ID NO: 374 and SEQ ID NO: 531, respectively;
[1370] lxi. SEQ ID NO: 375 and SEQ ID NO: 532, respectively;
[1371] lxii. SEQ ID NO: 376 and SEQ ID NO: 533, respectively;
[1372] lxiii. SEQ ID NO: 377 and SEQ ID NO: 534, respectively;
[1373] lxiv. SEQ ID NO: 378 and SEQ ID NO: 535, respectively;
[1374] lxv. SEQ ID NO: 379 and SEQ ID NO: 536, respectively;
[1375] lxvi. SEQ ID NO: 380 and SEQ ID NO: 537, respectively;
[1376] lxvii. SEQ ID NO: 381 and SEQ ID NO: 538, respectively;
[1377] lxviii. SEQ ID NO: 382 and SEQ ID NO: 539, respectively;
[1378] lxix. SEQ ID NO: 383 and SEQ ID NO: 540, respectively;
[1379] lxx. SEQ ID NO: 384 and SEQ ID NO: 541, respectively;
[1380] lxxi. SEQ ID NO: 385 and SEQ ID NO: 542, respectively;
[1381] lxxii. SEQ ID NO: 386 and SEQ ID NO: 543, respectively;
[1382] lxxiii. SEQ ID NO: 387 and SEQ ID NO: 544, respectively;
[1383] lxxiv. SEQ ID NO: 388 and SEQ ID NO: 545, respectively;
[1384] lxxv. SEQ ID NO: 389 and SEQ ID NO: 546, respectively;
[1385] lxxvi. SEQ ID NO: 390 and SEQ ID NO: 547, respectively;
[1386] lxxvii. SEQ ID NO: 391 and SEQ ID NO: 548, respectively;
[1387] lxxviii. SEQ ID NO: 392 and SEQ ID NO: 549, respectively;
[1388] lxxix. SEQ ID NO: 393 and SEQ ID NO: 550, respectively;
[1389] lxxx. SEQ ID NO: 394 and SEQ ID NO: 551, respectively;
[1390] lxxxi. SEQ ID NO: 395 and SEQ ID NO: 552, respectively;
[1391] lxxxii. SEQ ID NO: 396 and SEQ ID NO: 553, respectively;
[1392] lxxxiii. SEQ ID NO: 397 and SEQ ID NO: 554, respectively;
[1393] lxxxiv. SEQ ID NO: 398 and SEQ ID NO: 555, respectively;
[1394] lxxxv. SEQ ID NO: 399 and SEQ ID NO: 556, respectively;
[1395] lxxxvi. SEQ ID NO: 400 and SEQ ID NO: 557, respectively;
[1396] lxxxvii. SEQ ID NO: 401 and SEQ ID NO: 558, respectively;
[1397] lxxxviii. SEQ ID NO: 402 and SEQ ID NO: 559, respectively;
[1398] lxxxix. SEQ ID NO: 403 and SEQ ID NO: 560, respectively;
[1399] xc. SEQ ID NO: 404 and SEQ ID NO: 561, respectively;
[1400] xci. SEQ ID NO: 405 and SEQ ID NO: 562, respectively;
[1401] xcii. SEQ ID NO: 406 and SEQ ID NO: 563, respectively;
[1402] xciii. SEQ ID NO: 407 and SEQ ID NO: 564, respectively;
[1403] xciv. SEQ ID NO: 408 and SEQ ID NO: 565, respectively;
[1404] xcv. SEQ ID NO: 409 and SEQ ID NO: 566, respectively;
[1405] xcvi. SEQ ID NO: 410 and SEQ ID NO: 567, respectively;
[1406] xcvii. SEQ ID NO: 411 and SEQ ID NO: 568, respectively;
[1407] xcviii. SEQ ID NO: 412 and SEQ ID NO: 569, respectively;
[1408] xcix. SEQ ID NO: 413 and SEQ ID NO: 570, respectively;
[1409] c. SEQ ID NO: 414 and SEQ ID NO: 571, respectively;
[1410] ci. SEQ ID NO: 415 and SEQ ID NO: 572, respectively;
[1411] cii. SEQ ID NO: 416 and SEQ ID NO: 573, respectively;
[1412] ciii. SEQ ID NO: 417 and SEQ ID NO: 574, respectively;
[1413] civ. SEQ ID NO: 418 and SEQ ID NO: 575, respectively;
[1414] cv. SEQ ID NO: 419 and SEQ ID NO: 576, respectively;
[1415] cvi. SEQ ID NO: 420 and SEQ ID NO: 577, respectively;
[1416] cvii. SEQ ID NO: 421 and SEQ ID NO: 578, respectively;
[1417] cviii. SEQ ID NO: 422 and SEQ ID NO: 579, respectively;
[1418] cix. SEQ ID NO: 423 and SEQ ID NO: 580, respectively;
[1419] cx. SEQ ID NO: 424 and SEQ ID NO: 581, respectively;
[1420] cxi. SEQ ID NO: 425 and SEQ ID NO: 582, respectively;
[1421] cxii. SEQ ID NO: 426 and SEQ ID NO: 583, respectively;
[1422] cxiii. SEQ ID NO: 427 and SEQ ID NO: 584, respectively;
[1423] cxiv. SEQ ID NO: 428 and SEQ ID NO: 585, respectively;
[1424] cxv. SEQ ID NO: 429 and SEQ ID NO: 586, respectively;
[1425] cxvi. SEQ ID NO: 430 and SEQ ID NO: 587, respectively;
[1426] cxvii. SEQ ID NO: 431 and SEQ ID NO: 588, respectively;
[1427] cxviii. SEQ ID NO: 432 and SEQ ID NO: 589, respectively;
[1428] cxix. SEQ ID NO: 433 and SEQ ID NO: 590, respectively;
[1429] cxx. SEQ ID NO: 434 and SEQ ID NO: 591, respectively;
[1430] cxxi. SEQ ID NO: 435 and SEQ ID NO: 592, respectively;
[1431] cxxii. SEQ ID NO: 436 and SEQ ID NO: 593, respectively;
[1432] cxxiii. SEQ ID NO: 437 and SEQ ID NO: 594, respectively;
[1433] cxxiv. SEQ ID NO: 438 and SEQ ID NO: 595, respectively;
[1434] cxxv. SEQ ID NO: 439 and SEQ ID NO: 596, respectively;
[1435] cxxvi. SEQ ID NO: 440 and SEQ ID NO: 597, respectively;
[1436] cxxvii. SEQ ID NO: 441 and SEQ ID NO: 598, respectively;
[1437] cxxviii. SEQ ID NO: 442 and SEQ ID NO: 599, respectively;
[1438] cxxix. SEQ ID NO: 443 and SEQ ID NO: 600, respectively;
[1439] cxxx. SEQ ID NO: 444 and SEQ ID NO: 601, respectively;
[1440] cxxxi. SEQ ID NO: 445 and SEQ ID NO: 602, respectively;
[1441] cxxxii. SEQ ID NO: 446 and SEQ ID NO: 603, respectively;
[1442] cxxxiii. SEQ ID NO: 447 and SEQ ID NO: 604, respectively;
[1443] cxxxiv. SEQ ID NO: 448 and SEQ ID NO: 605, respectively;
[1444] cxxxv. SEQ ID NO: 449 and SEQ ID NO: 606, respectively;
[1445] cxxxvi. SEQ ID NO: 450 and SEQ ID NO: 607, respectively;
[1446] cxxxvii. SEQ ID NO: 451 and SEQ ID NO: 608, respectively;
[1447] cxxxviii. SEQ ID NO: 452 and SEQ ID NO: 609, respectively;
[1448] cxxxix. SEQ ID NO: 453 and SEQ ID NO: 610, respectively;
[1449] cxl. SEQ ID NO: 454 and SEQ ID NO: 611, respectively;
[1450] cxli. SEQ ID NO: 455 and SEQ ID NO: 612, respectively;
[1451] cxlii. SEQ ID NO: 456 and SEQ ID NO: 613, respectively;
[1452] cxliii. SEQ ID NO: 457 and SEQ ID NO: 614, respectively;
[1453] cxliv. SEQ ID NO: 458 and SEQ ID NO: 615, respectively;
[1454] cxlv. SEQ ID NO: 459 and SEQ ID NO: 616, respectively;
[1455] cxlvi. SEQ ID NO: 460 and SEQ ID NO: 617, respectively;
[1456] cxlvii. SEQ ID NO: 461 and SEQ ID NO: 618, respectively;
[1457] cxlviii. SEQ ID NO: 462 and SEQ ID NO: 619, respectively;
[1458] cxlix. SEQ ID NO: 463 and SEQ ID NO: 620, respectively;
[1459] cl. SEQ ID NO: 464 and SEQ ID NO: 621, respectively;
[1460] cli. SEQ ID NO: 465 and SEQ ID NO: 622, respectively;
[1461] clii. SEQ ID NO: 466 and SEQ ID NO: 623, respectively;
[1462] cliii. SEQ ID NO: 467 and SEQ ID NO: 624, respectively;
[1463] cliv. SEQ ID NO: 468 and SEQ ID NO: 625, respectively;
[1464] clv. SEQ ID NO: 469 and SEQ ID NO: 626, respectively;
[1465] clvi. SEQ ID NO: 470 and SEQ ID NO: 627, respectively; and
[1466] clvii. SEQ ID NO: 471 and SEQ ID NO: 628, respectively,
[1467] wherein the antigen-binding protein (e.g., the anti-GIPR antibody) preferably comprises one or more cysteine amino acid substitution(s) at one or more position(s) selected from 88 of the light chain, 384 of the heavy chain, or 487 of the heavy chain, according to AHo numbering.

[1468] In some embodiments, the light chain comprises the amino acid sequence of SEQ ID NO: 388 and the heavy chain comprises the amino acid sequence of SEQ ID NO: 1571; or the light chain comprises the amino acid sequence of SEQ ID NO: 455 and the heavy chain comprises the amino acid sequence of SEQ ID NO: 1572; or the light chain comprises the amino acid sequence of SEQ ID NO: 389 and the heavy chain comprises the amino acid sequence of SEQ ID NO: 1573; or the light chain comprises the amino acid sequence of SEQ ID NO: 455 and the heavy chain comprises the amino acid sequence of SEQ ID NO: 1574; or the light chain comprises the amino acid sequence of SEQ ID NO: 1575 and the heavy chain comprises the amino acid sequence of SEQ ID NO: 612.

[1469] In some embodiments, the light chain comprises the amino acid sequence of SEQ ID NO: 388 and the heavy chain comprises the amino acid sequence of SEQ ID NO: 1571.

[1470] In some embodiments, the antigen-binding protein comprises the CDRs, variable domains, and/or full length sequences listed in Tables 9-17 and is a monoclonal antibody, a chimeric antibody, a humanized antibody, a human antibody, a multispecific antibody, or an antibody fragment of the foregoing. In some embodiments, the antigen-binding protein is a monoclonal antibody. In some embodiments, the antigen-binding protein is a chimeric antibody. In some embodiments, the antigen-binding protein is a humanized antibody. In some embodiments, the antigen-binding protein is a human antibody. In some embodiments, the antigen-binding protein is a multispecific antibody. In some embodiments, the antigen-binding protein is an antibody fragment, optionally a Fab fragment, a Fab′ fragment, an F(ab′)₂ fragment, an Fv fragment, a diabody, or a scFv.

[1471] In some embodiments, the antigen-binding protein (e.g., the anti-GIPR antibody) competes with one of the antibodies of Table 9 for specific binding to a human GIPR (e.g., SEQ ID NO: 1577, SEQ ID NO: 1578, or SEQ ID NO: 1579). In some embodiments, the antigen-binding protein binds to the same epitope as one of the one of the antibodies of Table 9, or to an overlapping epitope.

[1472] In some embodiments, the antigen-binding protein (e.g., the anti-GIPR antibody) competes with iPS:361192 for specific binding to a human GIPR (e.g., SEQ ID NO: 1577, SEQ ID NO: 1578, or SEQ ID NO: 1579). In some embodiments, the antigen-binding protein binds to the same epitope as iPS:361192, or to an overlapping epitope.

[1473] In some embodiments, the antigen-binding protein (e.g., the anti-GIPR antibody) competes with iPS:336067 for specific binding to a human GIPR (e.g., SEQ ID NO: 1577, SEQ ID NO: 1578, or SEQ ID NO: 1579). In some embodiments, the antigen-binding protein binds to the same epitope as iPS:336067, or to an overlapping epitope.

[1474] In some embodiments, the antigen-binding protein is a monoclonal antibody. Monoclonal antibodies can be produced using any technique known in the art, e.g., by immortalizing spleen cells harvested from the transgenic animal after completion of the immunization schedule. The spleen cells can be immortalized using any technique known in the art, e.g., by fusing them with myeloma cells to produce hybridomas. Myeloma cells for use in hybridoma-producing fusion procedures preferably are non-antibody-producing, have high fusion efficiency, and possess enzyme deficiencies that render them incapable of growing in certain selective media which support the growth of only the desired fused cells (hybridomas). Examples of suitable cell lines for use in mouse fusions include, but are not limited to, Sp-20, P3-X63/Ag8, P3-X63-Ag8.653, NS1/1.Ag 4 1, Sp210-Ag14, FO, NSO/U, MPC-11, MPC11-X45-GTG 1.7 and 5194/5XXO Bul; examples of cell lines used in rat fusions include, but are not limited to, R210.RCY3, Y3-Ag 1.2.3, IR983F and 4B210. Other cell lines useful for cell fusions include, but are not limited to, U-266, GM1500-GRG2, LICR-LON-HMy2 and UC729-6.

[1475] In some instances, a hybridoma cell line can be produced by immunizing an animal (e.g., a transgenic animal having human immunoglobulin sequences) with a GIPR immunogen; harvesting spleen cells from the immunized animal; fusing the harvested spleen cells to a myeloma cell line, thereby generating hybridoma cells; establishing hybridoma cell lines from the hybridoma cells, and identifying a hybridoma cell line that produces an antibody that binds a GIPR polypeptide. Monoclonal antibodies secreted by a hybridoma cell line can be purified using any technique known in the art.

[1476] In some embodiments, the antigen-binding protein is a chimeric antibody, which is an antibody composed of protein segments from different antibodies that are covalently joined to produce functional immunoglobulin light or heavy chains or immunologically functional portions thereof. Generally, a portion of the heavy chain and/or light chain is identical with or homologous to a corresponding sequence in antibodies derived from a particular species or belonging to a particular antibody class or subclass, while the remainder of the chain(s) is/are identical with or homologous to a corresponding sequence in antibodies derived from another species or belonging to another antibody class or subclass. For methods relating to chimeric antibodies, see, for example, U.S. Pat. No. 4,816,567; and Morrison et al., 1985, Proc. Natl. Acad. Sci. USA 81:6851-6855, which are hereby incorporated by reference. CDR grafting is described, for example, in U.S. Pat. Nos. 6,180,370, 5,693,762, 5,693,761, 5,585,089, and 5,530,101.

[1477] Generally, the goal of making a chimeric antibody is to create a chimera in which the number of amino acids from the intended patient species is maximized. One non-limiting example is the “CDR-grafted” antibody, in which the antibody comprises one or more complementarity determining regions (CDRs) from a particular species or belonging to a particular antibody class or subclass, while the remainder of the antibody chain(s) is/are identical with or homologous to a corresponding sequence in antibodies derived from another species or belonging to another antibody class or subclass. For use in humans, the variable region or selected CDRs from a rodent antibody can be grafted into a human antibody, replacing the naturally-occurring variable regions or CDRs of the human antibody.

[1478] In some embodiments, the chimeric antibody is a humanized antibody. Generally, a humanized antibody is produced from a monoclonal antibody raised initially in a non-human animal. Certain amino acid residues in this monoclonal antibody, typically from non-antigen recognizing portions of the antibody, are modified to be homologous to corresponding residues in a human antibody of corresponding isotype. Humanization can be performed, for example, using various methods by substituting at least a portion of a rodent variable region for the corresponding regions of a human antibody (see, e.g., U.S. Pat. Nos. 5,585,089, and 5,693,762; Jones et al., 1986, Nature 321:522-525; Riechmann et al., 1988, Nature 332:323-27; Verhoeyen et al., 1988, Science 239:1534-1536).

[1479] In some embodiments, the CDRs of the light and heavy chain variable regions of the anti-GIPR antibodies provided herein are grafted to framework regions (FRs) from antibodies from the same, or a different, phylogenetic species. For example, the CDRs of the heavy and light chain variable regions V_{H}1, V_{H}2, V_{H}3, V_{H}4, V_{H}5, V_{H}6, V_{H}7, V_{H}8, V_{H}9, V_{H}10, V_{H}11, V_{H}12 and/or V_{L}1, and V_{L}2 can be grafted to consensus human FRs. To create consensus human FRs, FRs from several human heavy chain or light chain amino acid sequences may be aligned to identify a consensus amino acid sequence. In other embodiments, the FRs of a heavy chain or light chain disclosed herein are replaced with the FRs from a different heavy chain or light chain. In one aspect, rare amino acids in the FRs of the heavy and light chains of GIPR antibodies are not replaced, while the rest of the FR amino acids are replaced. A “rare amino acid” is a specific amino acid that is in a position in which this particular amino acid is not usually found in an FR. Alternatively, the grafted variable regions from the one heavy or light chain may be used with a constant region that is different from the constant region of that particular heavy or light chain as disclosed herein. In other embodiments, the grafted variable regions are part of a single chain Fv antibody.

[1480] In some embodiments, constant regions from species other than human can be used along with the human variable region(s) to produce hybrid antibodies.

[1481] In some embodiments, the antigen-binding protein is a human antibody. Methods are available for making fully human antibodies specific for a given antigen without exposing human beings to the antigen. One specific means provided for implementing the production of fully human antibodies is the “humanization” of the mouse humoral immune system. Introduction of human immunoglobulin (Ig) loci into mice in which the endogenous Ig genes have been inactivated is one means of producing fully human monoclonal antibodies (mAbs) in mouse, an animal that can be immunized with any desirable antigen. Using fully human antibodies can minimize the immunogenic and allergic responses that can sometimes be caused by administering mouse or mouse-derived mAbs to humans as therapeutic agents.

[1482] Fully human antibodies can be produced by immunizing transgenic animals (usually mice) that are capable of producing a repertoire of human antibodies in the absence of endogenous immunoglobulin production. Antigens for this purpose typically have six or more contiguous amino acids, and optionally are conjugated to a carrier, such as a hapten. See, e.g., Jakobovits et al., 1993, Proc. Natl. Acad. Sci. USA 90:2551-2555; Jakobovits et al., 1993, Nature 362:255-258; and Bruggermann et al., 1993, Year in Immunol. 7:33. In one example of such a method, transgenic animals are produced by incapacitating the endogenous mouse immunoglobulin loci encoding the mouse heavy and light immunoglobulin chains therein, and inserting into the mouse genome large fragments of human genome DNA containing loci that encode human heavy and light chain proteins. Partially modified animals, which have less than the full complement of human immunoglobulin loci, are then cross-bred to obtain an animal having all of the desired immune system modifications. When administered an immunogen, these transgenic animals produce antibodies that are immunospecific for the immunogen but have human rather than murine amino acid sequences, including the variable regions. For further details of such methods, see, for example, WO96/33735 and WO94/02602. Additional methods relating to transgenic mice for making human antibodies are described in U.S. Pat. Nos. 5,545,807; 6,713,610; 6,673,986; 6,162,963; 5,545,807; 6,300,129; 6,255,458; 5,877,397; 5,874,299 and 5,545,806; in PCT publications WO91/10741, WO90/04036, and in EP 546073B1 and EP 546073A1.

[1483] Fully human antibodies can also be derived from phage-display libraries (as disclosed in Hoogenboom et al., 1991, J. Mol. Biol. 227:381; and Marks et al., 1991, J. Mol. Biol. 222:581). Phage display techniques mimic immune selection through the display of antibody repertoires on the surface of filamentous bacteriophage, and subsequent selection of phage by their binding to an antigen of choice. One such technique is described in PCT Publication No. WO 99/10494 (hereby incorporated by reference).

[1484] In some embodiments, the antigen-binding protein is a mimetic (e.g., a “peptide mimetic” or “peptidomimetic”) based upon the variable region domains and CDRs that are described herein. These analogs can be peptides, non-peptides, or combinations of peptide and non-peptide regions. Fauchere, 1986, Adv. Drug Res. 15:29; Veber and Freidinger, 1985, TINS p. 392; and Evans et al., 1987, J. Med. Chem. 30:1229, which are incorporated herein by reference for any purpose. Peptide mimetics that are structurally similar to therapeutically useful peptides may be used to produce a similar therapeutic or prophylactic effect. Such compounds are often developed with the aid of computerized molecular modeling. Generally, peptidomimetics are proteins that are structurally similar to an antibody displaying a desired biological activity, such as the ability to specifically bind GIPR, but have one or more peptide linkages optionally replaced by a linkage selected from: —CH₂NH—, —CH₂S—, —CH₂—CH₂—, —CH—CH— (cis and trans), —COCH₂—, —CH(OH)CH₂—, and —CH₂SO—, by methods well known in the art. In some embodiments, systematic substitution of one or more amino acids of a consensus sequence with a D-amino acid of the same type (e.g., D-lysine in place of L-lysine) can be used to generate more stable proteins. In addition, constrained peptides comprising a consensus sequence or a substantially identical consensus sequence variation can be generated by methods known in the art (Rizo and Gierasch, 1992, Ann. Rev. Biochem. 61:387), incorporated herein by reference), for example, by adding internal cysteine residues capable of forming intramolecular disulfide bridges which cyclize the peptide.

[1485] In some embodiments, the antigen-binding protein may be derivatized. In some embodiments, the derivatized antigen-binding protein comprises a molecule that imparts a desired property to the antigen-binding protein, such as increased half-life in a particular use. The derivatized antigen-binding protein can comprise, for example, a detectable (or labeling) moiety (e.g., a radioactive, colorimetric, antigenic, or enzymatic molecule, a detectable bead (such as, e.g., a magnetic or electrodense (e.g., gold) bead), or a molecule that binds to another molecule (e.g., biotin or streptavidin)), a therapeutic or diagnostic moiety (e.g., a radioactive, cytotoxic, or pharmaceutically active moiety), or a molecule that increases the suitability of the antigen-binding protein for a particular use (e.g., administration to a subject, such as a human subject, or other in vivo or in vitro uses). Non-limiting examples of molecules that can be used to derivatize an antigen-binding protein include albumin (e.g., human serum albumin) and polyethylene glycol (PEG). Albumin-linked and PEGylated derivatives of antigen-binding proteins can be prepared using techniques well known in the art. In some embodiments, the antigen-binding protein may be conjugated or otherwise linked to transthyretin (TTR) or a TTR variant. The TTR or TTR variant can be chemically modified with, for example, a chemical selected from the group consisting of dextran, poly(n-vinyl pyrrolidone), polyethylene glycols, polypropylene glycol homopolymers, polypropylene oxide/ethylene oxide co-polymers, polyoxyethylated polyols, and polyvinyl alcohols.

[1486] Antigen-binding proteins used in the conjugates described herein may be prepared by any of a number of conventional techniques. For example, antigen-binding proteins can be produced by recombinant expression systems. See, e.g., Monoclonal Antibodies, Hybridomas: A New Dimension in Biological Analyses, Kennet et al. (eds.) Plenum Press, New York (1980); and Antibodies: A Laboratory Manual, Harlow and Lane (eds.), Cold Spring Harbor Laboratory Press, Cold Spring Harbor, N.Y. (1988).

[1487] In some embodiments, antigen-binding proteins (e.g., anti-GIPR antibodies) can be expressed in hybridoma cell lines or in cell lines other than hybridomas. Expression constructs encoding the antigen-binding proteins (e.g., anti-GIPR antibodies) can be used to transform a mammalian, insect or microbial host cell. Transformation can be performed using any known method for introducing polynucleotides into a host cell, including, for example, packaging the polynucleotide in a virus or bacteriophage and transducing a host cell with the construct by transfection procedures known in the art, as exemplified by U.S. Pat. Nos. 4,399,216; 4,912,040; 4,740,461; 4,959,455. The choice of transformation procedure used will depend upon which type of host cell is being transformed. Methods for introduction of heterologous polynucleotides into mammalian cells are known in the art and include, but are not limited to, dextran-mediated transfection, calcium phosphate precipitation, polybrene mediated transfection, protoplast fusion, electroporation, encapsulation of the polynucleotide(s) in liposomes, mixing nucleic acid with positively-charged lipids, and direct microinjection of the DNA into nuclei.

[1488] Recombinant expression constructs typically comprise a nucleic acid molecule encoding a polypeptide comprising one or more of the following: one or more CDRs; a light chain constant region; a light chain variable region; a heavy chain constant region (e.g., C_{H}1, C_{H}2 and/or C_{H}3); and/or another scaffold portion of an antigen-binding protein (e.g., an anti-GIPR antibody). These nucleic acid sequences are inserted into an appropriate expression vector using standard ligation techniques. In some embodiments, the heavy or light chain constant region is appended to the C-terminus of the anti-GIPR specific heavy or light chain variable region and is ligated into an expression vector. The vector is typically selected to be functional in the particular host cell employed (i.e., the vector is compatible with the host cell machinery, permitting amplification, and/or expression of the gene can occur). In some embodiments, vectors are used that employ protein-fragment complementation assays using protein reporters, such as dihydrofolate reductase (see, for example, U.S. Pat. No. 6,270,964, which is hereby incorporated by reference). Expression vectors can be purchased, for example, from Invitrogen Life Technologies or BD Biosciences. Other useful vectors for cloning and expressing antigen-binding proteins (e.g., anti-GIPR antibodies) include, but are not limited to, those described in Bianchi and McGrew, 2003, Biotech. Biotechnol. Bioeng. 84:439-44, which is hereby incorporated by reference. Additional suitable expression vectors are discussed, for example, in Methods Enzymol., vol. 185 (D. V. Goeddel, ed.), 1990, New York: Academic Press.

[1489] Typically, expression vectors used in any of the host cells will contain sequences for plasmid maintenance and for cloning and expression of exogenous nucleotide sequences. Such sequences, collectively referred to as “flanking sequences,” can include one or more of the following nucleotide sequences: a promoter, one or more enhancer sequences, an origin of replication, a transcriptional termination sequence, a complete intron sequence containing a donor and acceptor splice site, a sequence encoding a leader sequence for polypeptide secretion, a ribosome binding site, a polyadenylation sequence, a polylinker region for inserting the nucleic acid encoding the polypeptide to be expressed, and a selectable marker element.

[1490] Optionally, the vector may contain a “tag”-encoding sequence, i.e., an oligonucleotide molecule located at the 5′ or 3′ end of the GIPR antigen binding protein coding sequence; the oligonucleotide sequence encodes polyHis (such as hexaHis), or another “tag” such as FLAG®, HA (hemagglutinin influenza virus), or myc, for which commercially available antibodies exist. This tag is typically fused to the polypeptide upon expression of the polypeptide, and can serve as a means for affinity purification or detection of the antigen-binding protein from the host cell. Affinity purification can be accomplished, for example, by column chromatography using antibodies against the tag as an affinity matrix. Optionally, the tag can subsequently be removed from the purified antigen-binding protein by various means such as using certain peptidases for cleavage.

[1491] Flanking sequences may be homologous (i.e., from the same species and/or strain as the host cell), heterologous (i.e., from a species other than the host cell species or strain), hybrid (i.e., a combination of flanking sequences from more than one source), synthetic, or native. As such, the source of a flanking sequence may be any prokaryotic or eukaryotic organism, any vertebrate or invertebrate organism, or any plant, provided that the flanking sequence is functional in, and can be activated by, the host cell machinery.

[1492] Flanking sequences useful in the vectors can be obtained by methods known in the art. Typically, flanking sequences will have been previously identified by mapping and/or by restriction endonuclease digestion and can thus be isolated from the proper tissue source using the appropriate restriction endonucleases. In some cases, the full nucleotide sequence of a flanking sequence may be known. The flanking sequence may be synthesized using conventional methods for nucleic acid synthesis or cloning.

[1493] Whether all or only a portion of the flanking sequence is known, it may be obtained using polymerase chain reaction (PCR) and/or by screening a genomic library with a suitable probe such as an oligonucleotide and/or flanking sequence fragment from the same or another species. Where the flanking sequence is not known, a fragment of DNA containing a flanking sequence may be isolated from a larger piece of DNA that may contain, for example, a coding sequence or even another gene or genes. Isolation may be accomplished by restriction endonuclease digestion to produce the proper DNA fragment followed by isolation using agarose gel purification, Qiagen® column chromatography (Chatsworth, CA), or other methods known to the skilled artisan. The selection of suitable enzymes to accomplish this purpose will be readily apparent to one of ordinary skill in the art.

[1494] An origin of replication is typically a part of commercially available prokaryotic expression vectors; the origin of replication aids in the amplification of the vector in a host cell. If the vector of choice does not contain an origin of replication site, one may be chemically synthesized based on a known sequence and ligated into the vector. For example, the origin of replication from the plasmid pBR322 (New England Biolabs, Beverly, MA) is suitable for most gram-negative bacteria and various viral origins (e.g., SV40, polyoma, adenovirus, vesicular stomatitus virus (VSV), or papillomaviruses, such as, e.g., HPV or BPV). Generally, the origin of replication component is not needed for mammalian expression vectors (for example, the SV40 origin is often used only because it also contains the virus early promoter).

[1495] A transcription termination sequence is typically located 3′ to the end of a polypeptide coding region and serves to terminate transcription. Usually, a transcription termination sequence in prokaryotic cells is a G-C rich fragment followed by a poly-T sequence. While the sequence is easily cloned from a library or even purchased commercially as part of a vector, it can also be readily synthesized using conventional methods for nucleic acid synthesis.

[1496] A selectable marker gene encodes a protein necessary for the survival and growth of a host cell grown in a selective culture medium. Typical selection marker genes encode proteins that (a) confer resistance to antibiotics or other toxins, e.g., ampicillin, tetracycline, or kanamycin for prokaryotic host cells; (b) complement auxotrophic deficiencies of the cell; or (c) supply critical nutrients not available from complex or defined media. Specific selectable markers are the kanamycin resistance gene, the ampicillin resistance gene, and the tetracycline resistance gene. Advantageously, a neomycin resistance gene may also be used for selection in both prokaryotic and eukaryotic host cells.

[1497] Other selectable genes may be used to amplify the gene that will be expressed. Amplification is the process wherein genes that are required for production of a protein critical for growth or cell survival are reiterated in tandem within the chromosomes of successive generations of recombinant cells. Examples of suitable selectable markers for mammalian cells include dihydrofolate reductase (DHFR) and promoterless thyrnidine kinase genes. Mammalian cell transformants are placed under selection pressure wherein only the transformants are uniquely adapted to survive by virtue of the selectable gene present in the vector. Selection pressure is imposed by culturing the transformed cells under conditions in which the concentration of selection agent in the medium is successively increased, thereby leading to the amplification of both the selectable gene and the DNA that encodes another gene, such as an antigen binding protein that binds GIPR polypeptide. As a result, increased quantities of a polypeptide such as an antigen binding protein are synthesized from the amplified DNA.

[1498] A ribosome-binding site is usually necessary for translation initiation of mRNA and is characterized by a Shine-Dalgarno sequence (prokaryotes) or a Kozak sequence (eukaryotes). The element is typically located 3′ to the promoter and 5′ to the coding sequence of the polypeptide to be expressed.

[1499] In some cases, such as where glycosylation is desired in a eukaryotic host cell expression system, one may manipulate the various pre- or pro-sequences to improve glycosylation or yield. For example, one may alter the peptidase cleavage site of a particular signal peptide, or add prosequences, which also may affect glycosylation. The final protein product may have, in the −1 position (relative to the first amino acid of the mature protein), one or more additional amino acids incident to expression, which may not have been totally removed. For example, the final protein product may have one or two amino acid residues found in the peptidase cleavage site, attached to the amino-terminus. Alternatively, use of some enzyme cleavage sites may result in a slightly truncated form of the desired polypeptide, if the enzyme cuts at such area within the mature polypeptide.

[1500] Expression and cloning will typically contain a promoter that is recognized by the host organism and operably linked to the molecule encoding the antigen-binding protein. Promoters are untranscribed sequences located upstream (i.e., 5′) to the start codon of a structural gene (generally within about 100 to 1000 bp) that control transcription of the structural gene. Promoters are conventionally grouped into one of two classes: inducible promoters and constitutive promoters. Inducible promoters initiate increased levels of transcription from DNA under their control in response to some change in culture conditions, such as the presence or absence of a nutrient or a change in temperature. Constitutive promoters, on the other hand, uniformly transcribe a gene to which they are operably linked, that is, with little or no control over gene expression. A large number of promoters, recognized by a variety of potential host cells, are known. A suitable promoter is operably linked to the DNA encoding heavy chain or light chain comprising a GIPR antigen binding protein by removing the promoter from the source DNA by restriction enzyme digestion and inserting the desired promoter sequence into the vector.

[1501] Suitable promoters for use with yeast hosts are also known in the art. Yeast enhancers are advantageously used with yeast promoters. Suitable promoters for use with mammalian host cells are known and include, but are not limited to, those obtained from the genomes of viruses such as polyoma virus, fowlpox virus, adenovirus (such as, e.g., Adenovirus 2), bovine papilloma virus, avian sarcoma virus, cytomegalovirus, retroviruses, hepatitis-B virus, and Simian Virus 40 (SV40). Other suitable mammalian promoters include, but are not limited to, heterologous mammalian promoters, for example, heat-shock promoters and the actin promoter.

[1502] An enhancer sequence may be inserted into the vector to increase transcription of DNA encoding light chain or heavy chain comprising a GIPR antigen binding protein by higher eukaryotes. Enhancers are cis-acting elements of DNA, usually about 10-300 bp in length, which act on the promoter to increase transcription. Enhancers are relatively orientation and position independent, having been found at positions both 5′ and 3′ to the transcription unit. Several enhancer sequences available from mammalian genes are known (e.g., globin, elastase, albumin, alpha-feto-protein and insulin). Alternatively, an enhancer from a virus can be used. The SV40 enhancer, the cytomegalovirus early promoter enhancer, the polyoma enhancer, and adenovirus enhancers known in the art are non-limiting examples of enhancing elements for the activation of eukaryotic promoters. While an enhancer may be positioned in the vector either 5′ or 3′ to a coding sequence, it is typically located at a site 5′ from the promoter. A sequence encoding an appropriate native or heterologous signal sequence (leader sequence or signal peptide) can be incorporated into an expression vector, e.g., to promote extracellular secretion of the antibody. The choice of signal peptide or leader depends on the type of host cells in which the antibody is to be produced, and a heterologous signal sequence can replace the native signal sequence. Non-limiting examples of signal peptides that are functional in mammalian host cells include the following: the signal sequence for interleukin-7 (IL-7) described in U.S. Pat. No. 4,965,195; the signal sequence for interleukin-2 receptor described in Cosman et al., 1984, Nature 312:768; the interleukin-4 receptor signal peptide described in EP Patent No. 0367 566; the type I interleukin-1 receptor signal peptide described in U.S. Pat. No. 4,968,607; the type II interleukin-1 receptor signal peptide described in EP Patent No. 0 460 846.

[1503] In one embodiment the leader sequence comprises SEQ ID NO: 1585 (MDMRVPAQLL GLLLLWLRGA RC). In another embodiment the leader sequence comprises SEQ ID NO: 1586 (MAWALLLLTL LTQGTGSWA).

[1504] Expression vectors may be constructed from a starting vector such as a commercially available vector. Such vectors may or may not contain all of the desired flanking sequences. Where one or more of the flanking sequences described herein are not already present in the vector, they may be individually obtained and ligated into the vector. Methods used for obtaining each of the flanking sequences are known to one skilled in the art.

[1505] After the vector has been constructed and a nucleic acid molecule encoding a light chain, a heavy chain, or a light chain and a heavy chain has been inserted into the proper site of the vector, the completed vector may be inserted into a suitable host cell for amplification and/or polypeptide expression. The transformation of an expression vector for an antigen-binding protein into a selected host cell may be accomplished by conventional methods including, but not limited to, transfection, infection, calcium phosphate co-precipitation, electroporation, microinjection, lipofection, DEAE-dextran mediated transfection, or other known techniques. The method selected will in part be a function of the type of host cell to be used. These methods and other suitable methods are known to the skilled artisan, and are set forth, for example, in Sambrook et al., 2001, supra.

[1506] A host cell, when cultured under appropriate conditions, synthesizes an antigen-binding protein that can subsequently be collected from the culture medium (if the host cell secretes it into the medium) or directly from the host cell producing it (if it is not secreted). The selection of an appropriate host cell will depend upon various factors, such as, e.g., desired expression levels, polypeptide modifications that are desirable or necessary for activity (such as, e.g., glycosylation or phosphorylation), and ease of folding into a biologically active molecule.

[1507] Mammalian cell lines available as hosts for expression are known in the art and include, but are not limited to, immortalized cell lines available from the American Type Culture Collection (ATCC), including, but not limited to, Chinese hamster ovary (CHO) cells, HeLa cells, baby hamster kidney (BHK) cells, monkey kidney cells (COS), human hepatocellular carcinoma cells (e.g., Hep G2), and a number of other cell lines. In some embodiments, a host cell line can be selected by determining which cell lines have high expression levels and constitutively produce the desired antigen-binding protein (e.g., the desired anti-GIPR antibody). In some embodiments, a cell line from the B cell lineage that does not make its own antibody but has a capacity to make and secrete a heterologous antibody can be selected.

[1508] Additionally, in some embodiments, a mammalian cell line modified to provide for reduced cleavage of peptides that will be conjugated to polypeptides expressed by the cells (e.g., a cathepsin D knock-out cell line) can be used. In some embodiments, a mammalian cell line (e.g., a CHO cell line) in which both alleles of cathepsin D are knocked out (e.g., using CRISPR or zinc-finger technology) can be used. An example of a cathepsin D knock-out cell that can be used to produce an antibody-peptide conjugate of the disclosure is described in WO 2023/086790, which is incorporated by reference herein.

[1509] In some embodiments, the first polypeptide that agonizes a glucagon receptor is glucagon or a glucagon analog. In some embodiments, the first polypeptide is glucagon. In some embodiments, the first polypeptide is human glucagon. In some embodiments, the first polypeptide is a glucagon analog. In some embodiments, the first polypeptide is a human glucagon analog.

[1510] In some embodiments, the first polypeptide comprises the amino acid sequence of SEQ ID NO: 1576. In some embodiments, the first polypeptide consists of the amino acid sequence of SEQ ID NO: 1576.

[1511] In some embodiments, the first polypeptide has at least 68%, at least 72%, at least 75%, at least 79%, at least 82%, at least 86%, at least 89%, at least 93%, or at least 96% sequence identity to SEQ ID NO: 1576. In some embodiments, the first polypeptide has at least 68% sequence identity to SEQ ID NO: 1576. In some embodiments, the first polypeptide has at least 72% sequence identity to SEQ ID NO: 1576. In some embodiments, the first polypeptide has at least 75% sequence identity to SEQ ID NO: 1576. In some embodiments, the first polypeptide has at least 79% sequence identity to SEQ ID NO: 1576. In some embodiments, the first polypeptide has at least 82% sequence identity to SEQ ID NO: 1576. In some embodiments, the first polypeptide has at least 86% sequence identity to SEQ ID NO: 1576. In some embodiments, the first polypeptide has at least 89% sequence identity to SEQ ID NO: 1576. In some embodiments, the first polypeptide has at least 93% sequence identity to SEQ ID NO: 1576. In some embodiments, the first polypeptide has at least 96% sequence identity to SEQ ID NO: 1576.

[1512] In some embodiments, the first polypeptide comprises an amino acid sequence having at most nine (e.g., zero, one, two, three, four, five, six, seven, eight, or nine) amino acid modifications relative to SEQ ID NO: 1576. In some embodiments, the first polypeptide comprises an amino acid sequence having at most eight amino acid modifications relative to SEQ ID NO: 1576. In some embodiments, the first polypeptide comprises an amino acid sequence having at most seven amino acid modifications relative to SEQ ID NO: 1576. In some embodiments, the first polypeptide comprises an amino acid sequence having at most six amino acid modifications relative to SEQ ID NO: 1576. In some embodiments, the first polypeptide comprises an amino acid sequence having at most five amino acid modifications relative to SEQ ID NO: 1576. In some embodiments, the first polypeptide comprises an amino acid sequence having at most four amino acid modifications relative to SEQ ID NO: 1576. In some embodiments, the first polypeptide comprises an amino acid sequence having at most three amino acid modifications relative to SEQ ID NO: 1576. In some embodiments, the first polypeptide comprises an amino acid sequence having at most two amino acid modifications relative to SEQ ID NO: 1576. In some embodiments, the first polypeptide comprises an amino acid sequence having at most one amino acid modification relative to SEQ ID NO: 1576.

[1513] In some embodiments, each amino acid modification, if any, is an amino acid substitution. In some embodiments, each amino acid modification, if any, is a conservative amino acid substitution. In some embodiments, each amino acid modification, if any, is a conservative amino acid substitution listed in Table 1.

[1514] In some embodiments, the at most one amino acid modification is an amino acid deletion. In some embodiments, the at most one amino acid modification is an amino acid addition.

[1515] Potential amino acid modifications relative to SEQ ID NO: 1576, include, but are not limited to, S2s, S16Aib, S16Q, S16E, R17K, R18A, R18Y, R18F, D21E, Q24D, Q24E, Q24K, W25-5-BrW, M27L, M27E, N28A, N28D, N28K, N28Q, and T29D.

[1516] In some embodiments, the first polypeptide is an glucagon receptor agonist polypeptide provided herein.

[1517] In some embodiments, the first polypeptide comprises an amino acid sequence with between three and nine modifications relative to SEQ ID NO: 1576, wherein the modifications are selected from:
[1518] tyrosine and phenylalanine at position 1;
[1519] d-serine, 2-aminoisobutyric acid, and d-threonine at position 2;
[1520] glutamic acid at position 3;
[1521] histidine at position 7;
[1522] tryptophan at position 10;
[1523] glutamic acid at position 15;
[1524] 2-aminoisobutyric acid, glutamine, homophenylalanine, and glutamic acid at position 16;
[1525] lysine, citrulline, glutamine, and alanine at position 17;
[1526] 2-naphthylalanine, L-4,4′-biphenylalanine, alanine, citrulline, and lysine at position 18;
[1527] 4-chloro-L-phenylalanine, alanine, d-glutamine, homoserine, histidine, arginine, and glutamic acid at position 20;
[1528] glutamic acid, citrulline, and d-aspartic acid at position 21;
[1529] tryptophan and β-cyclohexyl-L-alanine at position 22;
[1530] aspartic acid, lysine, alanine, 2-aminoisobutyric acid, glycine, histidine, asparagine, threonine, d-glutamine, glutamic acid, arginine, phenylalanine, leucine, serine, tyrosine, valine, isoleucine, homoserine, and 2,3-diaminopropionic acid at position 24;
[1531] 5-bromo-L-tryptophan, tyrosine, L-beta-homotryptophan, 5-methoxy-L-tryptophan, 5-methyl-L-tryptophan, 6-bromo-L-tryptophan, 6-chloro-L-tryptophan, 6-methyl-L-tryptophan, and 7-bromo-L-tryptophan at position 25;
[1532] leucine, glutamic acid, and L-α-aminoadipic acid at position 27;
[1533] lysine, aspartic acid, serine, 6-azido-L-lysine, glutamic acid, and alanine at position 28;
[1534] glutamic acid, serine, aspartic acid, and alanine at position 29;
[1535] an additional amino acid at position 30, wherein the additional amino acid is lysine; and
[1536] an additional amino acid at position 31, wherein the additional amino acid is lysine.

[1537] In some embodiments, the modifications comprise a d-serine at position 2, a 2-aminoisobutyric acid at position 16, and between one and seven other modifications at position 1, 3, 7, 10, 15, 17, 18, 20, 21, 22, 24, 25, 26, 27, 28, 29, 30, or 31 (e.g., at position 17, 21, 24, 25, 27, 28, or 29) as described above. In some embodiments, the modifications are selected from:
[1538] lysine at position 17;
[1539] glutamic acid at position 21;
[1540] lysine, alanine, and glutamic acid at position 24;
[1541] 5-bromo-L-tryptophan at position 25;
[1542] leucine and glutamic acid at position 27;
[1543] lysine, aspartic acid, and glutamic acid at position 28; and
[1544] glutamic acid and serine at position 29.

[1545] In some embodiments, the modifications comprise a d-serine at position 2, a 2-aminoisobutyric acid at position 16, and between one and six other modifications selected from:
[1546] lysine at position 17;
[1547] glutamic acid at position 21;
[1548] lysine, alanine, and glutamic acid at position 24;
[1549] leucine and glutamic acid at position 27;
[1550] lysine, aspartic acid, and glutamic acid at position 28; and
[1551] glutamic acid and serine at position 29.

[1552] In some embodiments, the modifications comprise a d-serine at position 2, a 2-aminoisobutyric acid at position 16, and one or two other modifications selected from:
[1553] lysine at position 24; and
[1554] lysine and glutamic acid at position 28.

[1555] In some embodiments, the modifications comprise d-serine at position 2, 2-aminoisobutyric acid at position 16, and lysine at position 24. In some embodiments, the modifications comprise d-serine at position 2, 2-aminoisobutyric acid at position 16, lysine at position 24, and glutamic acid at position 28.

[1556] In some embodiments, the modifications comprise d-serine at position 2, 2-aminoisobutyric acid at position 16, and lysine at position 28.

[1557] In some embodiments, the modifications comprise tyrosine at position 1, d-serine at position 2, and 2-aminoisobutyric acid at position 16. In some embodiments, the modifications comprise phenylalanine at position 1, d-serine at position 2, and 2-aminoisobutyric acid at position 16.

[1558] In some embodiments, the modifications comprise d-serine at position 2, glutamic acid at position 3, and 2-aminoisobutyric acid at position 16.

[1559] In some embodiments, the modifications comprise d-serine at position 2, histidine at position 7, and 2-aminoisobutyric acid at position 16.

[1560] In some embodiments, the modifications comprise d-serine at position 2, tryptophan at position 10, and 2-aminoisobutyric acid at position 16.

[1561] In some embodiments, the modifications comprise d-serine at position 2, glutamic acid at position 15, and 2-aminoisobutyric acid at position 16.

[1562] In some embodiments, the modifications comprise d-serine at position 2, 2-aminoisobutyric acid at position 16, and lysine at position 17. In some embodiments, the modifications comprise d-serine at position 2, 2-aminoisobutyric acid at position 16, and citrulline at position 17. In some embodiments, the modifications comprise d-serine at position 2, 2-aminoisobutyric acid at position 16, and glutamine at position 17. In some embodiments, the modifications comprise d-serine at position 2, 2-aminoisobutyric acid at position 16, and alanine at position 17.

[1563] In some embodiments, the modifications comprise d-serine at position 2, 2-aminoisobutyric acid at position 16, and 2-naphthylalanine at position 18. In some embodiments, the modifications comprise d-serine at position 2, 2-aminoisobutyric acid at position 16, and L-4,4′-biphenylalanine at position 18. In some embodiments, the modifications comprise d-serine at position 2, 2-aminoisobutyric acid at position 16, and alanine at position 18. In some embodiments, the modifications comprise d-serine at position 2, 2-aminoisobutyric acid at position 16, and citrulline at position 18. In some embodiments, the modifications comprise d-serine at position 2, 2-aminoisobutyric acid at position 16, and lysine at position 18.

[1564] In some embodiments, the modifications comprise d-serine at position 2, 2-aminoisobutyric acid at position 16, and 4-chloro-L-phenylalanine at position 20. In some embodiments, the modifications comprise d-serine at position 2, 2-aminoisobutyric acid at position 16, and alanine at position 20. In some embodiments, the modifications comprise d-serine at position 2, 2-aminoisobutyric acid at position 16, and d-glutamine at position 20. In some embodiments, the modifications comprise d-serine at position 2, 2-aminoisobutyric acid at position 16, and homoserine at position 20. In some embodiments, the modifications comprise d-serine at position 2, 2-aminoisobutyric acid at position 16, and histidine at position 20. In some embodiments, the modifications comprise d-serine at position 2, 2-aminoisobutyric acid at position 16, and arginine at position 20. In some embodiments, the modifications comprise d-serine at position 2, 2-aminoisobutyric acid at position 16, and glutamic acid at position 20.

[1565] In some embodiments, the modifications comprise d-serine at position 2, 2-aminoisobutyric acid at position 16, and glutamic acid at position 21. In some embodiments, the modifications comprise d-serine at position 2, 2-aminoisobutyric acid at position 16, and citrulline at position 21. In some embodiments, the modifications comprise d-serine at position 2, 2-aminoisobutyric acid at position 16, and d-aspartic acid at position 21.

[1566] In some embodiments, the modifications comprise d-serine at position 2, 2-aminoisobutyric acid at position 16, and tryptophan at position 22. In some embodiments, the modifications comprise d-serine at position 2, 2-aminoisobutyric acid at position 16, and β-cyclohexyl-L-alanine at position 22.

[1567] In some embodiments, the modifications comprise d-serine at position 2, 2-aminoisobutyric acid at position 16, and aspartic acid at position 24. In some embodiments, the modifications comprise d-serine at position 2, 2-aminoisobutyric acid at position 16, and lysine at position 24. In some embodiments, the modifications comprise d-serine at position 2, 2-aminoisobutyric acid at position 16, and alanine at position 24. In some embodiments, the modifications comprise d-serine at position 2, 2-aminoisobutyric acid at position 16, and 2-aminoisobutyric acid at position 24. In some embodiments, the modifications comprise d-serine at position 2, 2-aminoisobutyric acid at position 16, and glycine at position 24. In some embodiments, the modifications comprise d-serine at position 2, 2-aminoisobutyric acid at position 16, and histidine at position 24. In some embodiments, the modifications comprise d-serine at position 2, 2-aminoisobutyric acid at position 16, and asparagine at position 24. In some embodiments, the modifications comprise d-serine at position 2, 2-aminoisobutyric acid at position 16, and threonine at position 24. In some embodiments, the modifications comprise d-serine at position 2, 2-aminoisobutyric acid at position 16, and d-glutamine at position 24. In some embodiments, the modifications comprise d-serine at position 2, 2-aminoisobutyric acid at position 16, and glutamic acid at position 24. In some embodiments, the modifications comprise d-serine at position 2, 2-aminoisobutyric acid at position 16, and arginine at position 24. In some embodiments, the modifications comprise d-serine at position 2, 2-aminoisobutyric acid at position 16, and phenylalanine at position 24. In some embodiments, the modifications comprise d-serine at position 2, 2-aminoisobutyric acid at position 16, and leucine at position 24. In some embodiments, the modifications comprise d-serine at position 2, 2-aminoisobutyric acid at position 16, and serine at position 24. In some embodiments, the modifications comprise d-serine at position 2, 2-aminoisobutyric acid at position 16, and tyrosine at position 24. In some embodiments, the modifications comprise d-serine at position 2, 2-aminoisobutyric acid at position 16, and valine at position 24. In some embodiments, the modifications comprise d-serine at position 2, 2-aminoisobutyric acid at position 16, and isoleucine at position 24. In some embodiments, the modifications comprise d-serine at position 2, 2-aminoisobutyric acid at position 16, and homoserine at position 24. In some embodiments, the modifications comprise d-serine at position 2, 2-aminoisobutyric acid at position 16, and 2,3-diaminopropionic acid at position 24.

[1568] In some embodiments, the modifications comprise d-serine at position 2, 2-aminoisobutyric acid at position 16, and 5-bromo-L-tryptophan at position 25. In some embodiments, the modifications comprise d-serine at position 2, 2-aminoisobutyric acid at position 16, and tyrosine at position 25. In some embodiments, the modifications comprise d-serine at position 2, 2-aminoisobutyric acid at position 16, and L-beta-homotryptophan at position 25. In some embodiments, the modifications comprise d-serine at position 2, 2-aminoisobutyric acid at position 16, and 5-methoxy-L-tryptophan at position 25. In some embodiments, the modifications comprise d-serine at position 2, 2-aminoisobutyric acid at position 16, and 5-methyl-L-tryptophan at position 25. In some embodiments, the modifications comprise d-serine at position 2, 2-aminoisobutyric acid at position 16, and 6-bromo-L-tryptophan at position 25. In some embodiments, the modifications comprise d-serine at position 2, 2-aminoisobutyric acid at position 16, and 6-chloro-L-tryptophan at position 25. In some embodiments, the modifications comprise d-serine at position 2, 2-aminoisobutyric acid at position 16, and 6-methyl-L-tryptophan at position 25. In some embodiments, the modifications comprise d-serine at position 2, 2-aminoisobutyric acid at position 16, and 7-bromo-L-tryptophan at position 25.

[1569] In some embodiments, the modifications comprise d-serine at position 2, 2-aminoisobutyric acid at position 16, and alanine at position 24.

[1570] In some embodiments, the modifications comprise d-serine at position 2, 2-aminoisobutyric acid at position 16, and leucine at position 27. In some embodiments, the modifications comprise d-serine at position 2, 2-aminoisobutyric acid at position 16, and glutamic acid at position 27. In some embodiments, the modifications comprise d-serine at position 2, 2-aminoisobutyric acid at position 16, and L-α-aminoadipic acid at position 27.

[1571] In some embodiments, the modifications comprise d-serine at position 2, 2-aminoisobutyric acid at position 16, and lysine at position 28. In some embodiments, the modifications comprise d-serine at position 2, 2-aminoisobutyric acid at position 16, and aspartic acid at position 28. In some embodiments, the modifications comprise d-serine at position 2, 2-aminoisobutyric acid at position 16, and serine at position 28. In some embodiments, the modifications comprise d-serine at position 2, 2-aminoisobutyric acid at position 16, and 6-azido-L-lysine at position 28. In some embodiments, the modifications comprise d-serine at position 2, 2-aminoisobutyric acid at position 16, and glutamic acid at position 28. In some embodiments, the modifications comprise d-serine at position 2, 2-aminoisobutyric acid at position 16, and alanine at position 28.

[1572] In some embodiments, the modifications comprise d-serine at position 2, 2-aminoisobutyric acid at position 16, and glutamic acid at position 29. In some embodiments, the modifications comprise d-serine at position 2, 2-aminoisobutyric acid at position 16, and serine at position 29. In some embodiments, the modifications comprise d-serine at position 2, 2-aminoisobutyric acid at position 16, and aspartic acid at position 29. In some embodiments, the modifications comprise d-serine at position 2, 2-aminoisobutyric acid at position 16, and alanine at position 29.

[1573] In some embodiments, the modifications comprise d-serine at position 2, 2-aminoisobutyric acid at position 16, and an additional amino acid at position 30, wherein the additional amino acid is lysine.

[1574] In some embodiments, the modifications comprise d-serine at position 2, 2-aminoisobutyric acid at position 16, and an additional amino acid at position 31, wherein the additional amino acid is lysine. In some embodiments, the modifications comprise d-serine at position 2, 2-aminoisobutyric acid at position 16, an additional amino acid at position 30, and an additional amino acid at position 31, wherein the additional amino acid at position 30 and the additional amino acid at position 31 are both lysine.

[1575] In some embodiments, the first polypeptide comprises at least 25 amino acids, wherein: the first polypeptide comprises 5-bromo-tryptophan at position 25; and the first polypeptide has at least 79% (e.g., at least 82%, at least 86%, at least 89%, at least 93%, at least 96%) sequence identity to the amino acid sequence of SEQ ID NO: 1587. In some embodiments, the first polypeptide comprises SEQ ID NO: 1587. In some embodiments, the first polypeptide consists of SEQ ID NO: 1587.

[1576] In some embodiments, the first polypeptide comprises at least 28 amino acids, wherein: the first polypeptide comprises 2-aminoisobutyric acid at position 16 and lysine, serine, or aspartic acid at position 28; and the first polypeptide has at least 89% (e.g., at least 93%, at least 96%) sequence identity to the amino acid sequence of SEQ ID NO: 1596. In some embodiments, the first polypeptide comprises SEQ ID NO: 1596. In some embodiments, the first polypeptide consists of SEQ ID NO: 1596.

[1577] In some embodiments, the first polypeptide comprises at least 28 amino acids, wherein: the first polypeptide comprises 2-aminoisobutyric acid at position 16, leucine at position 27, and lysine at position 28; and the first polypeptide has at least 89% (e.g., at least 93%, at least 96%) sequence identity to the amino acid sequence of SEQ ID NO: 1615. In some embodiments, the first polypeptide comprises SEQ ID NO: 1615. In some embodiments, the first polypeptide consists of SEQ ID NO: 1615.

[1578] In some embodiments, the first polypeptide comprises at least 28 amino acids, wherein: the first polypeptide comprises 2-aminoisobutyric acid at position 16, aspartic acid at position 24, and lysine at position 28; and the first polypeptide has at least 89% (e.g., at least 93%, at least 96%) sequence identity to the amino acid sequence of SEQ ID NO: 1626.

[1579] In some embodiments, the first polypeptide comprises SEQ ID NO: 1626. In some embodiments, the first polypeptide consists of SEQ ID NO: 1626.

[1580] In some embodiments, the first polypeptide comprises at least 28 amino acids, wherein the first polypeptide comprises a d-serine at position 2 and a 2-aminoisobutyric acid at position 16; and the first polypeptide has at least 89% (e.g., at least 93%, at least 96%) sequence identity to the amino acid sequence of SEQ ID NO: 1822. In some embodiments, the first polypeptide comprises SEQ ID NO: 1822. In some embodiments, the first polypeptide consists of SEQ ID NO: 1822.

[1581] In some embodiments, the first polypeptide comprises the amino acid sequence of any one of SEQ ID NOs: 1587-1627, 1747-1840, 1859-1862, or 1879-1881. In some embodiments, the first polypeptide comprises the amino acid sequence of any one of SEQ ID NOs: 1587-1627 or 1747. In some embodiments, the first polypeptide comprises the amino acid sequence of any one of SEQ ID NOs: 1748-1840, 1859-1862, or 1879-1881.

[1582] In some embodiments, the first polypeptide comprises the amino acid sequence of any one of SEQ ID NOs: 1587-1627.

[1583] In some embodiments, the first polypeptide comprises the amino acid sequence of any one of SEQ ID NOs: 1587, 1592, 1615, 1626, 1818, 1822, 1825, or 1826. In some embodiments, the first polypeptide comprises the amino acid sequence of any one of SEQ ID NOs: 1587, 1592, 1615, or 1626. In some embodiments, the first polypeptide comprises the amino acid sequence of any one of SEQ ID NOs: 1626, 1818, 1822, 1825, or 1826.

[1584] In some embodiments, the first polypeptide comprises the amino acid sequence of any one of SEQ ID NOs: 1596, 1597, 1615, 1626, 1818, 1822, 1825, or 1826. In some embodiments, the first polypeptide comprises the amino acid sequence of any one of SEQ ID NOs: 1596, 1597, 1615, or 1626.

[1585] In some embodiments, the first polypeptide consists of the amino acid sequence of any one of SEQ ID NOs: 1587-1627, 1747-1840, 1859-1862, or 1879-1881. In some embodiments, the first polypeptide consists of the amino acid sequence of any one of SEQ ID NOs: 1587-1627 or 1747. In some embodiments, the first polypeptide consists of the amino acid sequence of any one of SEQ ID NOs: 1748-1840, 1859-1862, or 1879-1881.

[1586] In some embodiments, the first polypeptide consists of the amino acid sequence of any one of SEQ ID NOs: 1587-1627.

[1587] In some embodiments, the first polypeptide consists of the amino acid sequence of any one of SEQ ID NOs: 1587, 1592, 1615, 1626, 1818, 1822, 1825, or 1826. In some embodiments, the first polypeptide consists of the amino acid sequence of any one of SEQ ID NOs: 1587, 1592, 1615, or 1626. In some embodiments, the first polypeptide consists of the amino acid sequence of any one of SEQ ID NOs: 1626, 1818, 1822, 1825, or 1826.

[1588] In some embodiments, the first polypeptide consists of the amino acid sequence of any one of SEQ ID NOs: 1596, 1597, 1615, or 1626.

[1589] In some embodiments, the first polypeptide comprises the amino acid sequence of SEQ ID NO: 1587. In some embodiments, the first polypeptide comprises the amino acid sequence of SEQ ID NO: 1588. In some embodiments, the first polypeptide comprises the amino acid sequence of SEQ ID NO: 1589. In some embodiments, the first polypeptide comprises the amino acid sequence of SEQ ID NO: 1590. In some embodiments, the first polypeptide comprises the amino acid sequence of SEQ ID NO: 1591. In some embodiments, the first polypeptide comprises the amino acid sequence of SEQ ID NO: 1592. In some embodiments, the first polypeptide comprises the amino acid sequence of SEQ ID NO: 1593. In some embodiments, the first polypeptide comprises the amino acid sequence of SEQ ID NO: 1594. In some embodiments, the first polypeptide comprises the amino acid sequence of SEQ ID NO: 1595. In some embodiments, the first polypeptide comprises the amino acid sequence of SEQ ID NO: 1596. In some embodiments, the first polypeptide comprises the amino acid sequence of SEQ ID NO: 1597. In some embodiments, the first polypeptide comprises the amino acid sequence of SEQ ID NO: 1598. In some embodiments, the first polypeptide comprises the amino acid sequence of SEQ ID NO: 1599. In some embodiments, the first polypeptide comprises the amino acid sequence of SEQ ID NO: 1600. In some embodiments, the first polypeptide comprises the amino acid sequence of SEQ ID NO: 1601. In some embodiments, the first polypeptide comprises the amino acid sequence of SEQ ID NO: 1602. In some embodiments, the first polypeptide comprises the amino acid sequence of SEQ ID NO: 1603. In some embodiments, the first polypeptide comprises the amino acid sequence of SEQ ID NO: 1604. In some embodiments, the first polypeptide comprises the amino acid sequence of SEQ ID NO: 1605. In some embodiments, the first polypeptide comprises the amino acid sequence of SEQ ID NO: 1606. In some embodiments, the first polypeptide comprises the amino acid sequence of SEQ ID NO: 1607. In some embodiments, the first polypeptide comprises the amino acid sequence of SEQ ID NO: 1608. In some embodiments, the first polypeptide comprises the amino acid sequence of SEQ ID NO: 1609. In some embodiments, the first polypeptide comprises the amino acid sequence of SEQ ID NO: 1610. In some embodiments, the first polypeptide comprises the amino acid sequence of SEQ ID NO: 1611. In some embodiments, the first polypeptide comprises the amino acid sequence of SEQ ID NO: 1612. In some embodiments, the first polypeptide comprises the amino acid sequence of SEQ ID NO: 1613. In some embodiments, the first polypeptide comprises the amino acid sequence of SEQ ID NO: 1614. In some embodiments, the first polypeptide comprises the amino acid sequence of SEQ ID NO: 1615. In some embodiments, the first polypeptide comprises the amino acid sequence of SEQ ID NO: 1616. In some embodiments, the first polypeptide comprises the amino acid sequence of SEQ ID NO: 1617. In some embodiments, the first polypeptide comprises the amino acid sequence of SEQ ID NO: 1618. In some embodiments, the first polypeptide comprises the amino acid sequence of SEQ ID NO: 1619. In some embodiments, the first polypeptide comprises the amino acid sequence of SEQ ID NO: 1620. In some embodiments, the first polypeptide comprises the amino acid sequence of SEQ ID NO: 1621. In some embodiments, the first polypeptide comprises the amino acid sequence of SEQ ID NO: 1622. In some embodiments, the first polypeptide comprises the amino acid sequence of SEQ ID NO: 1623. In some embodiments, the first polypeptide comprises the amino acid sequence of SEQ ID NO: 1624. In some embodiments, the first polypeptide comprises the amino acid sequence of SEQ ID NO: 1625. In some embodiments, the first polypeptide comprises the amino acid sequence of SEQ ID NO: 1626. In some embodiments, the first polypeptide comprises the amino acid sequence of SEQ ID NO: 1627.

[1590] In some embodiments, the first polypeptide comprises the amino acid sequence of SEQ ID NO: 1747. In some embodiments, the first polypeptide comprises the amino acid sequence of SEQ ID NO: 1748. In some embodiments, the first polypeptide comprises the amino acid sequence of SEQ ID NO: 1749. In some embodiments, the first polypeptide comprises the amino acid sequence of SEQ ID NO: 1750. In some embodiments, the first polypeptide comprises the amino acid sequence of SEQ ID NO: 1751. In some embodiments, the first polypeptide comprises the amino acid sequence of SEQ ID NO: 1752. In some embodiments, the first polypeptide comprises the amino acid sequence of SEQ ID NO: 1753. In some embodiments, the first polypeptide comprises the amino acid sequence of SEQ ID NO: 1754. In some embodiments, the first polypeptide comprises the amino acid sequence of SEQ ID NO: 1755. In some embodiments, the first polypeptide comprises the amino acid sequence of SEQ ID NO: 1756. In some embodiments, the first polypeptide comprises the amino acid sequence of SEQ ID NO: 1757. In some embodiments, the first polypeptide comprises the amino acid sequence of SEQ ID NO: 1758. In some embodiments, the first polypeptide comprises the amino acid sequence of SEQ ID NO: 1759. In some embodiments, the first polypeptide comprises the amino acid sequence of SEQ ID NO: 1760. In some embodiments, the first polypeptide comprises the amino acid sequence of SEQ ID NO: 1761. In some embodiments, the first polypeptide comprises the amino acid sequence of SEQ ID NO: 1762. In some embodiments, the first polypeptide comprises the amino acid sequence of SEQ ID NO: 1763. In some embodiments, the first polypeptide comprises the amino acid sequence of SEQ ID NO: 1764. In some embodiments, the first polypeptide comprises the amino acid sequence of SEQ ID NO: 1765. In some embodiments, the first polypeptide comprises the amino acid sequence of SEQ ID NO: 1766. In some embodiments, the first polypeptide comprises the amino acid sequence of SEQ ID NO: 1767. In some embodiments, the first polypeptide comprises the amino acid sequence of SEQ ID NO: 1768. In some embodiments, the first polypeptide comprises the amino acid sequence of SEQ ID NO: 1769. In some embodiments, the first polypeptide comprises the amino acid sequence of SEQ ID NO: 1770. In some embodiments, the first polypeptide comprises the amino acid sequence of SEQ ID NO: 1771. In some embodiments, the first polypeptide comprises the amino acid sequence of SEQ ID NO: 1772. In some embodiments, the first polypeptide comprises the amino acid sequence of SEQ ID NO: 1773. In some embodiments, the first polypeptide comprises the amino acid sequence of SEQ ID NO: 1774. In some embodiments, the first polypeptide comprises the amino acid sequence of SEQ ID NO: 1775. In some embodiments, the first polypeptide comprises the amino acid sequence of SEQ ID NO: 1776. In some embodiments, the first polypeptide comprises the amino acid sequence of SEQ ID NO: 1777. In some embodiments, the first polypeptide comprises the amino acid sequence of SEQ ID NO: 1778. In some embodiments, the first polypeptide comprises the amino acid sequence of SEQ ID NO: 1779. In some embodiments, the first polypeptide comprises the amino acid sequence of SEQ ID NO: 1780. In some embodiments, the first polypeptide comprises the amino acid sequence of SEQ ID NO: 1781. In some embodiments, the first polypeptide comprises the amino acid sequence of SEQ ID NO: 1782. In some embodiments, the first polypeptide comprises the amino acid sequence of SEQ ID NO: 1783. In some embodiments, the first polypeptide comprises the amino acid sequence of SEQ ID NO: 1784. In some embodiments, the first polypeptide comprises the amino acid sequence of SEQ ID NO: 1785. In some embodiments, the first polypeptide comprises the amino acid sequence of SEQ ID NO: 1786. In some embodiments, the first polypeptide comprises the amino acid sequence of SEQ ID NO: 1787. In some embodiments, the first polypeptide comprises the amino acid sequence of SEQ ID NO: 1788. In some embodiments, the first polypeptide comprises the amino acid sequence of SEQ ID NO: 1789. In some embodiments, the first polypeptide comprises the amino acid sequence of SEQ ID NO: 1790. In some embodiments, the first polypeptide comprises the amino acid sequence of SEQ ID NO: 1791. In some embodiments, the first polypeptide comprises the amino acid sequence of SEQ ID NO: 1792. In some embodiments, the first polypeptide comprises the amino acid sequence of SEQ ID NO: 1793. In some embodiments, the first polypeptide comprises the amino acid sequence of SEQ ID NO: 1794. In some embodiments, the first polypeptide comprises the amino acid sequence of SEQ ID NO: 1795. In some embodiments, the first polypeptide comprises the amino acid sequence of SEQ ID NO: 1796. In some embodiments, the first polypeptide comprises the amino acid sequence of SEQ ID NO: 1797. In some embodiments, the first polypeptide comprises the amino acid sequence of SEQ ID NO: 1798. In some embodiments, the first polypeptide comprises the amino acid sequence of SEQ ID NO: 1799. In some embodiments, the first polypeptide comprises the amino acid sequence of SEQ ID NO: 1800. In some embodiments, the first polypeptide comprises the amino acid sequence of SEQ ID NO: 1801. In some embodiments, the first polypeptide comprises the amino acid sequence of SEQ ID NO: 1802. In some embodiments, the first polypeptide comprises the amino acid sequence of SEQ ID NO: 1803. In some embodiments, the first polypeptide comprises the amino acid sequence of SEQ ID NO: 1804. In some embodiments, the first polypeptide comprises the amino acid sequence of SEQ ID NO: 1805. In some embodiments, the first polypeptide comprises the amino acid sequence of SEQ ID NO: 1806. In some embodiments, the first polypeptide comprises the amino acid sequence of SEQ ID NO: 1807. In some embodiments, the first polypeptide comprises the amino acid sequence of SEQ ID NO: 1808. In some embodiments, the first polypeptide comprises the amino acid sequence of SEQ ID NO: 1809. In some embodiments, the first polypeptide comprises the amino acid sequence of SEQ ID NO: 1810. In some embodiments, the first polypeptide comprises the amino acid sequence of SEQ ID NO: 1811. In some embodiments, the first polypeptide comprises the amino acid sequence of SEQ ID NO: 1812. In some embodiments, the first polypeptide comprises the amino acid sequence of SEQ ID NO: 1813. In some embodiments, the first polypeptide comprises the amino acid sequence of SEQ ID NO: 1814. In some embodiments, the first polypeptide comprises the amino acid sequence of SEQ ID NO: 1815. In some embodiments, the first polypeptide comprises the amino acid sequence of SEQ ID NO: 1816. In some embodiments, the first polypeptide comprises the amino acid sequence of SEQ ID NO: 1817. In some embodiments, the first polypeptide comprises the amino acid sequence of SEQ ID NO: 1818. In some embodiments, the first polypeptide comprises the amino acid sequence of SEQ ID NO: 1819. In some embodiments, the first polypeptide comprises the amino acid sequence of SEQ ID NO: 1820. In some embodiments, the first polypeptide comprises the amino acid sequence of SEQ ID NO: 1821. In some embodiments, the first polypeptide comprises the amino acid sequence of SEQ ID NO: 1822. In some embodiments, the first polypeptide comprises the amino acid sequence of SEQ ID NO: 1823. In some embodiments, the first polypeptide comprises the amino acid sequence of SEQ ID NO: 1824. In some embodiments, the first polypeptide comprises the amino acid sequence of SEQ ID NO: 1825. In some embodiments, the first polypeptide comprises the amino acid sequence of SEQ ID NO: 1826. In some embodiments, the first polypeptide comprises the amino acid sequence of SEQ ID NO: 1827. In some embodiments, the first polypeptide comprises the amino acid sequence of SEQ ID NO: 1828. In some embodiments, the first polypeptide comprises the amino acid sequence of SEQ ID NO: 1829. In some embodiments, the first polypeptide comprises the amino acid sequence of SEQ ID NO: 1830. In some embodiments, the first polypeptide comprises the amino acid sequence of SEQ ID NO: 1831. In some embodiments, the first polypeptide comprises the amino acid sequence of SEQ ID NO: 1832. In some embodiments, the first polypeptide comprises the amino acid sequence of SEQ ID NO: 1833. In some embodiments, the first polypeptide comprises the amino acid sequence of SEQ ID NO: 1834. In some embodiments, the first polypeptide comprises the amino acid sequence of SEQ ID NO: 1835. In some embodiments, the first polypeptide comprises the amino acid sequence of SEQ ID NO: 1836. In some embodiments, the first polypeptide comprises the amino acid sequence of SEQ ID NO: 1837. In some embodiments, the first polypeptide comprises the amino acid sequence of SEQ ID NO: 1838. In some embodiments, the first polypeptide comprises the amino acid sequence of SEQ ID NO: 1839. In some embodiments, the first polypeptide comprises the amino acid sequence of SEQ ID NO: 1840. In some embodiments, the first polypeptide comprises the amino acid sequence of SEQ ID NO: 1859. In some embodiments, the first polypeptide comprises the amino acid sequence of SEQ ID NO: 1860. In some embodiments, the first polypeptide comprises the amino acid sequence of SEQ ID NO: 1861. In some embodiments, the first polypeptide comprises the amino acid sequence of SEQ ID NO: 1862. In some embodiments, the first polypeptide consists of the amino acid sequence of SEQ ID NO: 1879. In some embodiments, the first polypeptide consists of the amino acid sequence of SEQ ID NO: 1880. In some embodiments, the first polypeptide consists of the amino acid sequence of SEQ ID NO: 1881.

[1591] In some embodiments, the first polypeptide consists of the amino acid sequence of SEQ ID NO: 1587. In some embodiments, the first polypeptide consists of the amino acid sequence of SEQ ID NO: 1588. In some embodiments, the first polypeptide consists of the amino acid sequence of SEQ ID NO: 1589. In some embodiments, the first polypeptide consists of the amino acid sequence of SEQ ID NO: 1590. In some embodiments, the first polypeptide consists of the amino acid sequence of SEQ ID NO: 1591. In some embodiments, the first polypeptide consists of the amino acid sequence of SEQ ID NO: 1592. In some embodiments, the first polypeptide consists of the amino acid sequence of SEQ ID NO: 1593. In some embodiments, the first polypeptide consists of the amino acid sequence of SEQ ID NO: 1594. In some embodiments, the first polypeptide consists of the amino acid sequence of SEQ ID NO: 1595. In some embodiments, the first polypeptide consists of the amino acid sequence of SEQ ID NO: 1596. In some embodiments, the first polypeptide consists of the amino acid sequence of SEQ ID NO: 1597. In some embodiments, the first polypeptide consists of the amino acid sequence of SEQ ID NO: 1598. In some embodiments, the first polypeptide consists of the amino acid sequence of SEQ ID NO: 1599. In some embodiments, the first polypeptide consists of the amino acid sequence of SEQ ID NO: 1600. In some embodiments, the first polypeptide consists of the amino acid sequence of SEQ ID NO: 1601. In some embodiments, the first polypeptide consists of the amino acid sequence of SEQ ID NO: 1602. In some embodiments, the first polypeptide consists of the amino acid sequence of SEQ ID NO: 1603. In some embodiments, the first polypeptide consists of the amino acid sequence of SEQ ID NO: 1604. In some embodiments, the first polypeptide consists of the amino acid sequence of SEQ ID NO: 1605. In some embodiments, the first polypeptide consists of the amino acid sequence of SEQ ID NO: 1606. In some embodiments, the first polypeptide consists of the amino acid sequence of SEQ ID NO: 1607. In some embodiments, the first polypeptide consists of the amino acid sequence of SEQ ID NO: 1608. In some embodiments, the first polypeptide consists of the amino acid sequence of SEQ ID NO: 1609. In some embodiments, the first polypeptide consists of the amino acid sequence of SEQ ID NO: 1610. In some embodiments, the first polypeptide consists of the amino acid sequence of SEQ ID NO: 1611. In some embodiments, the first polypeptide consists of the amino acid sequence of SEQ ID NO: 1612. In some embodiments, the first polypeptide consists of the amino acid sequence of SEQ ID NO: 1613. In some embodiments, the first polypeptide consists of the amino acid sequence of SEQ ID NO: 1614. In some embodiments, the first polypeptide consists of the amino acid sequence of SEQ ID NO: 1615. In some embodiments, the first polypeptide consists of the amino acid sequence of SEQ ID NO: 1616. In some embodiments, the first polypeptide consists of the amino acid sequence of SEQ ID NO: 1617. In some embodiments, the first polypeptide consists of the amino acid sequence of SEQ ID NO: 1618. In some embodiments, the first polypeptide consists of the amino acid sequence of SEQ ID NO: 1619. In some embodiments, the first polypeptide consists of the amino acid sequence of SEQ ID NO: 1620. In some embodiments, the first polypeptide consists of the amino acid sequence of SEQ ID NO: 1621. In some embodiments, the first polypeptide consists of the amino acid sequence of SEQ ID NO: 1622. In some embodiments, the first polypeptide consists of the amino acid sequence of SEQ ID NO: 1623. In some embodiments, the first polypeptide consists of the amino acid sequence of SEQ ID NO: 1624. In some embodiments, the first polypeptide consists of the amino acid sequence of SEQ ID NO: 1625. In some embodiments, the first polypeptide consists of the amino acid sequence of SEQ ID NO: 1626. In some embodiments, the first polypeptide consists of the amino acid sequence of SEQ ID NO: 1627.

[1592] In some embodiments, the first polypeptide consists of the amino acid sequence of SEQ ID NO: 1747. In some embodiments, the first polypeptide consists of the amino acid sequence of SEQ ID NO: 1748. In some embodiments, the first polypeptide consists of the amino acid sequence of SEQ ID NO: 1749. In some embodiments, the first polypeptide consists of the amino acid sequence of SEQ ID NO: 1750. In some embodiments, the first polypeptide consists of the amino acid sequence of SEQ ID NO: 1751. In some embodiments, the first polypeptide consists of the amino acid sequence of SEQ ID NO: 1752. In some embodiments, the first polypeptide consists of the amino acid sequence of SEQ ID NO: 1753. In some embodiments, the first polypeptide consists of the amino acid sequence of SEQ ID NO: 1754. In some embodiments, the first polypeptide consists of the amino acid sequence of SEQ ID NO: 1755. In some embodiments, the first polypeptide consists of the amino acid sequence of SEQ ID NO: 1756. In some embodiments, the first polypeptide consists of the amino acid sequence of SEQ ID NO: 1757. In some embodiments, the first polypeptide consists of the amino acid sequence of SEQ ID NO: 1758. In some embodiments, the first polypeptide consists of the amino acid sequence of SEQ ID NO: 1759. In some embodiments, the first polypeptide consists of the amino acid sequence of SEQ ID NO: 1760. In some embodiments, the first polypeptide consists of the amino acid sequence of SEQ ID NO: 1761. In some embodiments, the first polypeptide consists of the amino acid sequence of SEQ ID NO: 1762. In some embodiments, the first polypeptide consists of the amino acid sequence of SEQ ID NO: 1763. In some embodiments, the first polypeptide consists of the amino acid sequence of SEQ ID NO: 1764. In some embodiments, the first polypeptide consists of the amino acid sequence of SEQ ID NO: 1765. In some embodiments, the first polypeptide consists of the amino acid sequence of SEQ ID NO: 1766. In some embodiments, the first polypeptide consists of the amino acid sequence of SEQ ID NO: 1767. In some embodiments, the first polypeptide consists of the amino acid sequence of SEQ ID NO: 1768. In some embodiments, the first polypeptide consists of the amino acid sequence of SEQ ID NO: 1769. In some embodiments, the first polypeptide consists of the amino acid sequence of SEQ ID NO: 1770. In some embodiments, the first polypeptide consists of the amino acid sequence of SEQ ID NO: 1771. In some embodiments, the first polypeptide consists of the amino acid sequence of SEQ ID NO: 1772. In some embodiments, the first polypeptide consists of the amino acid sequence of SEQ ID NO: 1773. In some embodiments, the first polypeptide consists of the amino acid sequence of SEQ ID NO: 1774. In some embodiments, the first polypeptide consists of the amino acid sequence of SEQ ID NO: 1775. In some embodiments, the first polypeptide consists of the amino acid sequence of SEQ ID NO: 1776. In some embodiments, the first polypeptide consists of the amino acid sequence of SEQ ID NO: 1777. In some embodiments, the first polypeptide consists of the amino acid sequence of SEQ ID NO: 1778. In some embodiments, the first polypeptide consists of the amino acid sequence of SEQ ID NO: 1779. In some embodiments, the first polypeptide consists of the amino acid sequence of SEQ ID NO: 1780. In some embodiments, the first polypeptide consists of the amino acid sequence of SEQ ID NO: 1781. In some embodiments, the first polypeptide consists of the amino acid sequence of SEQ ID NO: 1782. In some embodiments, the first polypeptide consists of the amino acid sequence of SEQ ID NO: 1783. In some embodiments, the first polypeptide consists of the amino acid sequence of SEQ ID NO: 1784. In some embodiments, the first polypeptide consists of the amino acid sequence of SEQ ID NO: 1785. In some embodiments, the first polypeptide consists of the amino acid sequence of SEQ ID NO: 1786. In some embodiments, the first polypeptide consists of the amino acid sequence of SEQ ID NO: 1787. In some embodiments, the first polypeptide consists of the amino acid sequence of SEQ ID NO: 1788. In some embodiments, the first polypeptide consists of the amino acid sequence of SEQ ID NO: 1789. In some embodiments, the first polypeptide consists of the amino acid sequence of SEQ ID NO: 1790. In some embodiments, the first polypeptide consists of the amino acid sequence of SEQ ID NO: 1791. In some embodiments, the first polypeptide consists of the amino acid sequence of SEQ ID NO: 1792. In some embodiments, the first polypeptide consists of the amino acid sequence of SEQ ID NO: 1793. In some embodiments, the first polypeptide consists of the amino acid sequence of SEQ ID NO: 1794. In some embodiments, the first polypeptide consists of the amino acid sequence of SEQ ID NO: 1795. In some embodiments, the first polypeptide consists of the amino acid sequence of SEQ ID NO: 1796. In some embodiments, the first polypeptide consists of the amino acid sequence of SEQ ID NO: 1797. In some embodiments, the first polypeptide consists of the amino acid sequence of SEQ ID NO: 1798. In some embodiments, the first polypeptide consists of the amino acid sequence of SEQ ID NO: 1799. In some embodiments, the first polypeptide consists of the amino acid sequence of SEQ ID NO: 1800. In some embodiments, the first polypeptide consists of the amino acid sequence of SEQ ID NO: 1801. In some embodiments, the first polypeptide consists of the amino acid sequence of SEQ ID NO: 1802. In some embodiments, the first polypeptide consists of the amino acid sequence of SEQ ID NO: 1803. In some embodiments, the first polypeptide consists of the amino acid sequence of SEQ ID NO: 1804. In some embodiments, the first polypeptide consists of the amino acid sequence of SEQ ID NO: 1805. In some embodiments, the first polypeptide consists of the amino acid sequence of SEQ ID NO: 1806. In some embodiments, the first polypeptide consists of the amino acid sequence of SEQ ID NO: 1807. In some embodiments, the first polypeptide consists of the amino acid sequence of SEQ ID NO: 1808. In some embodiments, the first polypeptide consists of the amino acid sequence of SEQ ID NO: 1809. In some embodiments, the first polypeptide consists of the amino acid sequence of SEQ ID NO: 1810. In some embodiments, the first polypeptide consists of the amino acid sequence of SEQ ID NO: 1811. In some embodiments, the first polypeptide consists of the amino acid sequence of SEQ ID NO: 1812. In some embodiments, the first polypeptide consists of the amino acid sequence of SEQ ID NO: 1813. In some embodiments, the first polypeptide consists of the amino acid sequence of SEQ ID NO: 1814. In some embodiments, the first polypeptide consists of the amino acid sequence of SEQ ID NO: 1815. In some embodiments, the first polypeptide consists of the amino acid sequence of SEQ ID NO: 1816. In some embodiments, the first polypeptide consists of the amino acid sequence of SEQ ID NO: 1817. In some embodiments, the first polypeptide consists of the amino acid sequence of SEQ ID NO: 1818. In some embodiments, the first polypeptide consists of the amino acid sequence of SEQ ID NO: 1819. In some embodiments, the first polypeptide consists of the amino acid sequence of SEQ ID NO: 1820. In some embodiments, the first polypeptide consists of the amino acid sequence of SEQ ID NO: 1821. In some embodiments, the first polypeptide consists of the amino acid sequence of SEQ ID NO: 1822. In some embodiments, the first polypeptide consists of the amino acid sequence of SEQ ID NO: 1823. In some embodiments, the first polypeptide consists of the amino acid sequence of SEQ ID NO: 1824. In some embodiments, the first polypeptide consists of the amino acid sequence of SEQ ID NO: 1825. In some embodiments, the first polypeptide consists of the amino acid sequence of SEQ ID NO: 1826. In some embodiments, the first polypeptide consists of the amino acid sequence of SEQ ID NO: 1827. In some embodiments, the first polypeptide consists of the amino acid sequence of SEQ ID NO: 1828. In some embodiments, the first polypeptide consists of the amino acid sequence of SEQ ID NO: 1829. In some embodiments, the first polypeptide consists of the amino acid sequence of SEQ ID NO: 1830. In some embodiments, the first polypeptide consists of the amino acid sequence of SEQ ID NO: 1831. In some embodiments, the first polypeptide consists of the amino acid sequence of SEQ ID NO: 1832. In some embodiments, the first polypeptide consists of the amino acid sequence of SEQ ID NO: 1833. In some embodiments, the first polypeptide consists of the amino acid sequence of SEQ ID NO: 1834. In some embodiments, the first polypeptide consists of the amino acid sequence of SEQ ID NO: 1835. In some embodiments, the first polypeptide consists of the amino acid sequence of SEQ ID NO: 1836. In some embodiments, the first polypeptide consists of the amino acid sequence of SEQ ID NO: 1837. In some embodiments, the first polypeptide consists of the amino acid sequence of SEQ ID NO: 1838. In some embodiments, the first polypeptide consists of the amino acid sequence of SEQ ID NO: 1839. In some embodiments, the first polypeptide consists of the amino acid sequence of SEQ ID NO: 1840. In some embodiments, the first polypeptide consists of the amino acid sequence of SEQ ID NO: 1859. In some embodiments, the first polypeptide consists of the amino acid sequence of SEQ ID NO: 1860. In some embodiments, the first polypeptide consists of the amino acid sequence of SEQ ID NO: 1861. In some embodiments, the first polypeptide consists of the amino acid sequence of SEQ ID NO: 1862. In some embodiments, the first polypeptide consists of the amino acid sequence of SEQ ID NO: 1879. In some embodiments, the first polypeptide consists of the amino acid sequence of SEQ ID NO: 1880. In some embodiments, the first polypeptide consists of the amino acid sequence of SEQ ID NO: 1881.

[1593] In some embodiments, the first polypeptide is conjugated to the antigen-binding protein (e.g., the anti-GIPR antibody) through a linker moiety, such as, e.g., a linker moiety described below. In some embodiments, the first polypeptide is conjugated to the antigen-binding protein (e.g., the anti-GIPR antibody) through a first linker polypeptide, such as, e.g., a linker polypeptide described below. In some embodiments, the first linker polypeptide comprises the amino acid sequence of any one of SEQ ID NOs: 1628-1683, 1739-1746, or 1841-1852. In some embodiments, the first linker polypeptide comprises the amino acid sequence of any one of SEQ ID NOs: 1628-1683, 1739, 1850, or 1851. In some embodiments, the first linker polypeptide comprises the amino acid sequence of any one of SEQ ID NOs: 1740-1746, 1841-1849, or 1852. In some embodiments, the first linker polypeptide comprises the amino acid sequence of any one of SEQ ID NOs: 1628-1683. In some embodiments, the first linker polypeptide comprises the amino acid sequence of any one of SEQ ID NOs: 1628-1630. In some embodiments, the first linker polypeptide comprises the amino acid sequence of SEQ ID NO: 1628. In some embodiments, the first linker polypeptide comprises the amino acid sequence of SEQ ID NO: 1629. In some embodiments, the first linker polypeptide comprises the amino acid sequence of SEQ ID NO: 1630.

[1594] In some embodiments, a C-terminus of the first polypeptide is covalently linked to a C-terminus of a first linker polypeptide. In some embodiments, the C-terminus of the first polypeptide is derivatized. In some embodiments, the C-terminus of the first linker polypeptide is derivatized. In some embodiments, the C-termini of both the first polypeptide and the first linker polypeptide are derivatized.

[1595] In some embodiments, an ε-amino group of a lysine residue of the first polypeptide is covalently linked to a C-terminus of a first linker polypeptide. In some embodiments, a lysine residue of the first polypeptide is covalently linked to a C-terminus of the first linker polypeptide via an amide bond, e.g., an amide bond formed by condensation of an ε-amino group of a lysine residue of the first polypeptide and a carboxyl group of a C-terminus of the first polypeptide linker.

[1596] In some embodiments, an N-terminus of the first linker polypeptide is conjugated to a cysteine residue of the antigen-binding protein (e.g., the anti-GIPR antibody). For example, in some embodiments, a derivatized N-terminus of the first linker polypeptide is covalently linked to a cysteine residue of the antigen-binding protein (e.g., the anti-GIPR antibody) via a thioether linkage that comprises a sulfur atom of the cysteine residue. In some embodiments, an acetylated N-terminus of the first linker polypeptide is covalently linked to a cysteine residue of the antigen-binding protein (e.g., the anti-GIPR antibody) via a thioether linkage that comprises a sulfur atom of the cysteine residue.

[1597] In some embodiments, the antigen-binding protein is an antibody and the cysteine residue of the antibody that is conjugated to the N-terminus of the first linker polypeptide is at a position selected from the group consisting of 88 of a light chain, 384 of a heavy chain, and 487 of a heavy chain, according to AHo numbering. In some embodiments, the cysteine residue of the antibody that is conjugated to the N-terminus of the first linker polypeptide is at position 384 of a heavy chain, according to AHo numbering.

[1598] In some embodiments, an ε-amino group of a lysine residue of the first polypeptide is covalently linked to a C-terminus of a first linker polypeptide, and an N-terminus of the first linker polypeptide is conjugated to a cysteine residue of the antigen-binding protein (e.g., the anti-GIPR antibody). In some embodiments, the antigen-binding protein is an antibody and the cysteine residue of the antibody that is conjugated to the N-terminus of the first linker polypeptide is at a position selected from the group consisting of 88 of a light chain, 384 of a heavy chain, and 487 of a heavy chain, according to AHo numbering. In some embodiments, the cysteine residue of the antibody that is conjugated to the N-terminus of the first linker polypeptide is at position 384 of a heavy chain, according to AHo numbering.

[1599] In some embodiments, a C-terminal amino acid residue of the first polypeptide is covalently linked to a N-terminal amino acid residue of a first linker polypeptide. Additionally, in some embodiments, the C-terminus of the first linker polypeptide is derivatized. In some embodiments, the C-terminal amino acid residue of the first linker polypeptide is modified for coupling to a cysteine residue (e.g., is bromoacetylated). In some embodiments, the C-terminal amino acid residue of the first linker polypeptide is a lysine residue. In some embodiments, the C-terminal amino acid residue of the first linker polypeptide is modified for conjugation to a cysteine residue (e.g., bromoacetylated). In some embodiments, the C-terminal amino acid residue of the first linker polypeptide is a bromoacetylated lysine residue.

[1600] In some embodiments, a C-terminus of the first linker polypeptide is conjugated to a cysteine residue of the antigen-binding protein (e.g., the anti-GIPR antibody). For example, in some embodiments, a derivatized C-terminus of the first linker polypeptide is covalently linked to a cysteine residue of the antigen-binding protein (e.g., the anti-GIPR antibody) via a thioether linkage that comprises a sulfur atom of the cysteine residue. In some embodiments, an acetylated C-terminus of the first linker polypeptide is covalently linked to a cysteine residue of the antigen-binding protein (e.g., the anti-GIPR antibody) via a thioether linkage that comprises a sulfur atom of the cysteine residue.

[1601] In some embodiments, the antigen-binding protein is an antibody and the cysteine residue of the antibody that is conjugated to the C-terminus of the first linker polypeptide is at a position selected from the group consisting of 88 of a light chain, 384 of a heavy chain, and 487 of a heavy chain, according to AHo numbering. In some embodiments, the cysteine residue of the antibody that is conjugated to the C-terminus of the first linker polypeptide is at position 384 of a heavy chain, according to AHo numbering.

[1602] In some embodiments, a C-terminal amino acid residue of the first polypeptide is covalently linked to a N-terminal amino acid residue of a first linker polypeptide, and an C-terminus of the first linker polypeptide is conjugated to a cysteine residue of the antigen-binding protein (e.g., the anti-GIPR antibody). In some embodiments, the antigen-binding protein is an antibody and the cysteine residue of the antibody that is conjugated to the C-terminus of the first linker polypeptide is at a position selected from the group consisting of 88 of a light chain, 384 of a heavy chain, and 487 of a heavy chain, according to AHo numbering. In some embodiments, the cysteine residue of the antibody that is conjugated to the C-terminus of the first linker polypeptide is at position 384 of a heavy chain, according to AHo numbering.

[1603] In some embodiments, the molecule further comprises a second polypeptide that agonizes a GCGR. The second polypeptide agonist can be a polypeptide agonist as described above (such as, e.g., glucagon (SEQ ID NO: 1576) or a glucagon analog (e.g., a variant of SEQ ID NO: 1576 that includes one or more amino modifications, which may include, but are not limited to, S2s, S16Aib, S16Q, S16E, R17K, R18A, R18Y, R18F, D21E, Q24D, Q24E, Q24K, W25-5-BrW, M27L, M27E, N28A, N28D, N28K, N28Q, and T29D modifications, as described above). In some embodiments, the second polypeptide has the same amino acid sequence as the first polypeptide. In some embodiments, the second polypeptide has a different amino acid sequence than the first polypeptide.

[1604] In some embodiments, the second polypeptide comprises the amino acid sequence of any one of SEQ ID NOs: 1587-1627, 1747-1840, 1859-1862, or 1879-1881. In some embodiments, the second polypeptide comprises the amino acid sequence of any one of SEQ ID NOs: 1587-1627 or 1747. In some embodiments, the second polypeptide comprises the amino acid sequence of any one of SEQ ID NOs: 1587-1627. In some embodiments, the second polypeptide comprises the amino acid sequence of any one of SEQ ID NOs: 1747-1840, 1859-1862, or 1879-1881.

[1605] In some embodiments, the second polypeptide comprises the amino acid sequence of any one of SEQ ID NOs: 1587, 1592, 1615, 1626, 1818, 1822, 1825, or 1826. In some embodiments, the second polypeptide comprises the amino acid sequence of any one of SEQ ID NOs: 1587, 1592, 1596, 1615, or 1626. In some embodiments, the second polypeptide comprises the amino acid sequence of any one of SEQ ID NOs: 1587, 1592, 1615, or 1626. In some embodiments, the second polypeptide comprises the amino acid sequence of any one of SEQ ID NOs: 1626, 1818, 1822, 1825, or 1826. In some embodiments, the second polypeptide comprises the amino acid sequence of SEQ ID NO: 1587. In some embodiments, the second polypeptide comprises the amino acid sequence of SEQ ID NO: 1592. In some embodiments, the second polypeptide comprises the amino acid sequence of SEQ ID NO: 1596. In some embodiments, the second polypeptide comprises the amino acid sequence of SEQ ID NO: 1615. In some embodiments, the second polypeptide comprises the amino acid sequence of SEQ ID NO: 1626. In some embodiments, the second polypeptide comprises the amino acid sequence of SEQ ID NO: 1818. In some embodiments, the second polypeptide comprises the amino acid sequence of SEQ ID NO: 1822. In some embodiments, the second polypeptide comprises the amino acid sequence of SEQ ID NO: 1825. In some embodiments, the second polypeptide comprises the amino acid sequence of SEQ ID NO: 1826.

[1606] In some embodiments, the first polypeptide and the second polypeptide each independently comprise the amino acid sequence of any one of SEQ ID NOs: 1587-1627, 1747-1840, 1859-1862, or 1879-1881.

[1607] In some embodiments, the first polypeptide and the second polypeptide each independently comprise the amino acid sequence of any one of SEQ ID NOs: 1587-1627.

[1608] In some embodiments, the first polypeptide and the second polypeptide each independently comprise the amino acid sequence of any one of SEQ ID NOs: 1587, 1592, 1596, 1615, 1626, 1818, 1822, 1825, or 1826. In some embodiments, the first polypeptide and the second polypeptide each independently comprise the amino acid sequence of any one of SEQ ID NOs: 1587, 1592, 1615, 1626, 1818, 1822, 1825, or 1826. In some embodiments, the first polypeptide and the second polypeptide each independently comprise the amino acid sequence of any one of SEQ ID NOs: 1626, 1818, 1822, 1825, or 1826.

[1609] In some embodiments, the first polypeptide and the second polypeptide each independently comprise the amino acid sequence of any one of SEQ ID NOs: 1587, 1592, 1596, 1615, or 1626.

[1610] In some embodiments, the first polypeptide and the second polypeptide both comprise the amino acid sequence of SEQ ID NO: 1587. In some embodiments, the first polypeptide and the second polypeptide both comprise the amino acid sequence of SEQ ID NO: 1592. In some embodiments, the first polypeptide and the second polypeptide both comprise the amino acid sequence of SEQ ID NO: 1596. In some embodiments, the first polypeptide and the second polypeptide both comprise the amino acid sequence of SEQ ID NO: 1615. In some embodiments, the first polypeptide and the second polypeptide both comprise the amino acid sequence of SEQ ID NO: 1626. In some embodiments, the first polypeptide and the second polypeptide both comprise the amino acid sequence of SEQ ID NO: 1818. In some embodiments, the first polypeptide and the second polypeptide both comprise the amino acid sequence of SEQ ID NO: 1822. In some embodiments, the first polypeptide and the second polypeptide both comprise the amino acid sequence of SEQ ID NO: 1825. In some embodiments, the first polypeptide and the second polypeptide both comprise the amino acid sequence of SEQ ID NO: 1826.

[1611] In some embodiments, the second polypeptide is conjugated to the antigen-binding protein (e.g., the anti-GIPR antibody) through a linker moiety, such as, e.g., a linker moiety described below, which may be the same or different from the linker moiety used to conjugate the first polypeptide to the antigen-binding protein (e.g., the anti-GIPR antibody). In some embodiments, the second polypeptide is conjugated to the antigen-binding protein (e.g., the anti-GIPR antibody) through a second linker polypeptide, such as, e.g., a linker polypeptide described below.

[1612] In some embodiments, the second linker polypeptide comprises the amino acid sequence of any one of SEQ ID NOs: 1628-1683, 1739-1746, or 1841-1852. In some embodiments, the second linker polypeptide comprises the amino acid sequence of any one of SEQ ID NOs: 1628-1683, 1739, 1850, or 1851. In some embodiments, the second linker polypeptide comprises the amino acid sequence of any one of SEQ ID NOs: 1740-1746, 1841-1849, or 1852.

[1613] In some embodiments, the second linker polypeptide comprises the amino acid sequence of any one of SEQ ID NOs: 1628-1683. In some embodiments, the second linker polypeptide comprises the amino acid sequence of any one of SEQ ID NOs: 1628-1630. In some embodiments, the second linker polypeptide comprises the amino acid sequence of SEQ ID NO: 1628. In some embodiments, the second linker polypeptide comprises the amino acid sequence of SEQ ID NO: 1629. In some embodiments, the second linker polypeptide comprises the amino acid sequence of SEQ ID NO: 1630.

[1614] In some embodiments, the first linker polypeptide and the second linker polypeptide each independently comprise the amino acid sequence of any one of SEQ ID NOs: 1628-1683, 1739-1746, or 1841-1852. In some embodiments, the first linker polypeptide and the second linker polypeptide each independently comprise the amino acid sequence of any one of SEQ ID NOs: 1628-1683, 1739, 1850, or 1851. In some embodiments, the first linker polypeptide and the second linker polypeptide each independently comprise the amino acid sequence of any one of SEQ ID NOs: 1740-1746, 1841-1849, or 1852.

[1615] In some embodiments, the first linker polypeptide and the second linker polypeptide each independently comprise the amino acid sequence of any one of SEQ ID NOs: 1628-1683. In some embodiments, the first linker polypeptide and the second linker polypeptide are identical and comprise the amino acid sequence of any one of SEQ ID NOs: 1628-1683.

[1616] In some embodiments, the first linker polypeptide and the second linker polypeptide each independently the amino acid sequence of any one of SEQ ID NOs: 1628-1630. In some embodiments, the first linker polypeptide and the second linker polypeptide are identical and comprise the amino acid sequence of any one of SEQ ID NOs: 1628-1630.

[1617] In some embodiments, the first linker polypeptide and the second linker polypeptide both comprise the amino acid sequence of any one of SEQ ID NOs: 1628-1683, 1739-1746, or 1841-1852. In some embodiments, the first linker polypeptide and the second linker polypeptide both comprise the amino acid sequence of any one of SEQ ID NOs: 1628-1683, 1739, 1850, or 1851. In some embodiments, the first linker polypeptide and the second linker polypeptide both comprise the amino acid sequence of any one of SEQ ID NOs: 1740-1746, 1841-1849, or 1852.

[1618] In some embodiments, the first linker polypeptide and the second linker polypeptide both comprise the amino acid sequence of SEQ ID NO: 1628. In some embodiments, the first linker polypeptide and the second linker polypeptide both comprise the amino acid sequence of SEQ ID NO: 1629. In some embodiments, the first linker polypeptide and the second linker polypeptide both comprise the amino acid sequence of SEQ ID NO: 1630.

[1619] In some embodiments, a C-terminus of the second polypeptide is covalently linked to a C-terminus of a second linker polypeptide. In some embodiments, the C-terminus of the second polypeptide is derivatized. In some embodiments, the C-terminus of the second linker polypeptide is derivatized. In some embodiments, the C-termini of both the second polypeptide and the second linker polypeptide are derivatized.

[1620] In some embodiments, a C-terminus of the first polypeptide is covalently linked to a C-terminus of a first linker polypeptide, and a C-terminus of the second polypeptide is covalently linked to a C-terminus of a second linker polypeptide.

[1621] In some embodiments, an ε-amino group of a lysine residue of the second polypeptide is covalently linked to a C-terminus of a second linker polypeptide. For example, in some embodiments, a lysine residue of the second polypeptide is covalently linked to a C-terminus of the second linker polypeptide via an amide bond, e.g., an amide bond formed by condensation of an ε-amino group of a lysine residue of the second polypeptide and a carboxyl group of a C-terminus of the second polypeptide linker.

[1622] In some embodiments, an β-amino group of a lysine residue of the first polypeptide is covalently linked to a C-terminus of a first linker polypeptide, and an ε-amino group of a lysine residue of the second polypeptide is covalently linked to a C-terminus of a second linker polypeptide. Illustratively, in some embodiments, a lysine residue of the first polypeptide is covalently linked to a C-terminus of the first linker polypeptide via an amide bond, e.g., an amide bond formed by condensation of an ε-amino group of a lysine residue of the first polypeptide and a carboxyl group of a C-terminus of the first polypeptide linker, and a lysine residue of the second polypeptide is covalently linked to a C-terminus of the second linker polypeptide via an amide bond, e.g., an amide bond formed by condensation of an ε-amino group of a lysine residue of the second polypeptide and a carboxyl group of a C-terminus of the second polypeptide linker.

[1623] In some embodiments, an N-terminus of the second linker polypeptide is conjugated to a cysteine residue of the antigen-binding protein (e.g., the anti-GIPR antibody). For example, in some embodiments, an derivatized N-terminus of the second linker polypeptide is covalently linked to a cysteine residue of the antigen-binding protein (e.g., the anti-GIPR antibody) via a thioether linkage that comprises a sulfur atom of the cysteine residue. In some embodiments, an acetylated N-terminus of the second linker polypeptide is covalently linked to a cysteine residue of the antigen-binding protein (e.g., the anti-GIPR antibody) via a thioether linkage that comprises a sulfur atom of the cysteine residue.

[1624] In some embodiments, the antigen-binding protein is an antibody and the cysteine residue of the antibody that is conjugated to the N-terminus of the second linker polypeptide is at a position selected from the group consisting of 88 of a light chain, 384 of a heavy chain, and 487 of a heavy chain, according to AHo numbering. In some embodiments, the cysteine residue of the antibody that is conjugated to the N-terminus of the second linker polypeptide is at position 384 of a heavy chain, according to AHo numbering.

[1625] In some embodiments, an ε-amino group of a lysine residue of the second polypeptide is covalently linked to a C-terminus of a second linker polypeptide, and an N-terminus of the second linker polypeptide is conjugated to a cysteine residue of the antigen-binding protein (e.g., the anti-GIPR antibody). Illustratively, in some embodiments, a lysine residue of the second polypeptide is covalently linked to a C-terminus of the second linker polypeptide via an amide bond, e.g., an amide bond formed by condensation of an ε-amino group of a lysine residue of the second polypeptide and a carboxyl group of a C-terminus of the second polypeptide linker, and a derivatized (e.g., acetylated) N-terminus of the second linker polypeptide is covalently linked to a cysteine residue of the antigen-binding protein (e.g., the anti-GIPR antibody) via a thioether linkage that comprises a sulfur atom of the cysteine residue.

[1626] In some embodiments, the antigen-binding protein is an antibody and the cysteine residue of the antibody that is conjugated to the N-terminus of the second linker polypeptide is at a position selected from the group consisting of 88 of a light chain, 384 of a heavy chain, and 487 of a heavy chain, according to AHo numbering. In some embodiments, the cysteine residue of the antibody that is conjugated to the N-terminus of the second linker polypeptide is at position 384 of a heavy chain, according to AHo numbering.

[1627] In some embodiments, the cysteine residues of the antibody that are conjugated to the N-termini of the first linker polypeptide and the second linker polypeptide are at positions selected from the group consisting of 88 of both light chains, 384 of both heavy chains, and 487 of both heavy chains, according to AHo numbering.

[1628] In some embodiments, the cysteine residues of the antibody that are conjugated to the N-termini of the first linker polypeptide and the second linker polypeptide are at positions 384 of both heavy chains, according to AHo numbering.

[1629] In some embodiments, a C-terminal amino acid residue of the second polypeptide is covalently linked to a N-terminal amino acid of a second linker polypeptide.

[1630] In some embodiments, a C-terminal amino acid residue of the first polypeptide is covalently linked to a N-terminal amino acid residue of a first linker polypeptide, and a C-terminal amino acid residue of the second polypeptide is covalently linked to a N-terminal amino acid of a second linker polypeptide.

[1631] In some embodiments, a C-terminus of the second linker polypeptide is conjugated to a cysteine residue of the antigen-binding protein (e.g., the anti-GIPR antibody). For example, in some embodiments, a derivatized C-terminus of the second linker polypeptide is covalently linked to a cysteine residue of the antigen-binding protein (e.g., the anti-GIPR antibody) via a thioether linkage that comprises a sulfur atom of the cysteine residue. In some embodiments, an acetylated C-terminus of the second linker polypeptide is covalently linked to a cysteine residue of the antigen-binding protein (e.g., the anti-GIPR antibody) via a thioether linkage that comprises a sulfur atom of the cysteine residue.

[1632] In some embodiments, the antigen-binding protein is an antibody and the cysteine residue of the antibody that is conjugated to the C-terminus of the second linker polypeptide is at a position selected from the group consisting of 88 of a light chain, 384 of a heavy chain, and 487 of a heavy chain, according to AHo numbering. In some embodiments, the cysteine residue of the antibody that is conjugated to the C-terminus of the second linker polypeptide is at position 384 of a heavy chain, according to AHo numbering.

[1633] In some embodiments, a C-terminal amino acid residue of the second polypeptide is covalently linked to a N-terminal amino acid residue of a second linker polypeptide, and a C-terminus of the second linker polypeptide is conjugated to a cysteine residue of the antigen-binding protein (e.g., the anti-GIPR antibody).

[1634] In some embodiments, the antigen-binding protein is an antibody and the cysteine residue of the antibody that is conjugated to the C-terminus of the second linker polypeptide is at a position selected from the group consisting of 88 of a light chain, 384 of a heavy chain, and 487 of a heavy chain, according to AHo numbering. In some embodiments, the cysteine residue of the antibody that is conjugated to the C-terminus of the second linker polypeptide is at position 384 of a heavy chain, according to AHo numbering.

[1635] In some embodiments, the cysteine residues of the antibody that are conjugated to the C-termini of the first linker polypeptide and the second linker polypeptide are at positions selected from the group consisting of 88 of both light chains, 384 of both heavy chains, and 487 of both heavy chains, according to AHo numbering.

[1636] In some embodiments, the cysteine residues of the antibody that are conjugated to the C-termini of the first linker polypeptide and the second linker polypeptide are at positions 384 of both heavy chains, according to AHo numbering.

[1637] Also provided herein is a molecule comprising:
[1638] a first polypeptide that agonizes a glucagon receptor (“GCGR”);
[1639] a first linker polypeptide;
[1640] an antibody that specifically binds to a glucose-dependent insulinotropic polypeptide receptor (“GIPR”);
[1641] a second linker polypeptide; and
[1642] a second polypeptide that agonizes a GCGR, wherein:
   [1643] an ε-amino group of a lysine residue of the first polypeptide is covalently linked to a C-terminus of the first linker polypeptide;
   [1644] an N-terminus of the first linker polypeptide is conjugated to a cysteine residue of the antibody;
   [1645] an ε-amino group of a lysine residue of the second polypeptide is covalently linked to a C-terminus of the second linker polypeptide; and
   [1646] an N-terminus of the second linker polypeptide is conjugated to a cysteine residue of the antibody.

[1647] In some embodiments, the antibody that specifically binds to a GIPR (i.e., the anti-GIPR antibody) can be any anti-GIPR antibody described herein (e.g., an anti-GIPR antibody of Table 1 or otherwise described herein).

[1648] In some embodiments, the anti-GIPR antibody comprises a CDRL1, a CDRL2, a CDRL3, a CDRH1, a CDRH2, and a CDRH3, wherein the CDRL1, the CDRL2, the CDRL3, the CDRH1, the CDRH2, and the CDRH3 comprise the amino acid sequences of SEQ ID NO: 702, SEQ ID NO: 859, SEQ ID NO: 1016, SEQ ID NO: 1173, SEQ ID NO: 1330, and SEQ ID NO: 1487, respectively.

[1649] In some embodiments, the anti-GIPR antibody comprises a light chain variable region comprising the amino acid sequence of SEQ ID NO: 74 and a heavy chain variable region comprising the amino acid sequence of SEQ ID NO: 231.

[1650] In some embodiments, the anti-GIPR antibody comprises a light chain comprising the amino acid sequence of SEQ ID NO: 388 and a heavy chain comprising the amino acid sequence of SEQ ID NO: 1571.

[1651] In some embodiments, the first polypeptide and the second polypeptide can be any glucagon receptor agonist described herein (such as, e.g., glucagon (SEQ ID NO: 1576) or a glucagon analog (e.g., a variant of SEQ ID NO: 1576 that includes one or more amino modifications, which may include, but are not limited to, S2s, S16Aib, S16Q, S16E, R17K, R18A, R18Y, R18F, D21E, Q24D, Q24E, Q24K, W25-5-BrW, M27L, M27E, N28A, N28D, N28K, N28Q, and T29D modifications, as described above). In some embodiments, the second polypeptide has the same amino acid sequence as the first polypeptide. In some embodiments, the second polypeptide has a different amino acid sequence than the first polypeptide.

[1652] In some embodiments, the first polypeptide and the second polypeptide independently comprise amino acid sequences selected from SEQ ID NOs: 1587, 1592, 1615, 1626, 1818, 1822, 1825, and 1826. In some embodiments, the first polypeptide and the second polypeptide independently comprise amino acid sequences selected from SEQ ID NOs: 1626, 1818, 1822, 1825, and 1826.

[1653] In some embodiments, the first polypeptide and the second polypeptide independently comprise amino acid sequences selected from SEQ ID NOs: 1587, 1592, 1596, 1615, and 1626. In some embodiments, the first polypeptide and the second polypeptide independently comprise amino acid sequences selected from SEQ ID NOs: 1587, 1592, 1615, and 1626.

[1654] In some embodiments, the first polypeptide has the same amino acid sequence as the second polypeptide. In some embodiments, the first polypeptide has the same amino acid sequence as the second polypeptide, wherein the amino acid sequence is selected from SEQ ID NOs: 1587, 1592, 1615, 1626, 1818, 1822, 1825, and 1826. In some embodiments, the first polypeptide has the same amino acid sequence as the second polypeptide, wherein the amino acid sequence is selected from SEQ ID NOs: 1626, 1818, 1822, 1825, and 1826. In some embodiments, the first polypeptide has the same amino acid sequence as the second polypeptide, wherein the amino acid sequence is selected from SEQ ID NOs: 1587, 1592, 1596, 1615, and 1626. In some embodiments, the first polypeptide has the same amino acid sequence as the second polypeptide, wherein the amino acid sequence is selected from SEQ ID NOs: 1587, 1592, 1615, and 1626.

[1655] In some embodiments, the first linker polypeptide and the second linker polypeptide independently comprise amino acid sequences selected from SEQ ID NOs: 1628-1683, 1739-1746, and 1841-1852. In some embodiments, the first linker polypeptide and the second linker polypeptide independently comprise amino acid sequences selected from SEQ ID NOs: 1628-1683, 1739, 1850, and 1851. In some embodiments, the first linker polypeptide and the second linker polypeptide independently comprise amino acid sequences selected from SEQ ID NOs: 1740-1746, 1841-1849, and 1852.

[1656] In some embodiments, the first linker polypeptide and the second linker polypeptide independently comprise amino acid sequences selected from SEQ ID NOs: 1628-1683, preferably SEQ ID NOs: 1628-1630, preferably SEQ ID NO: 1630.

[1657] In some embodiments, the first linker polypeptide has the same amino acid sequence as the second linker polypeptide. In some embodiments, the first linker polypeptide has the same amino acid sequence as the second linker polypeptide, wherein the amino acid sequence is selected from 1628-1683, 1739-1746, and 1841-1852. In some embodiments, the first linker polypeptide has the same amino acid sequence as the second linker polypeptide, wherein the amino acid sequence is selected from SEQ ID NOs: 1628-1683, 1739, 1850, and 1851. In some embodiments, the first linker polypeptide has the same amino acid sequence as the second linker polypeptide, wherein the amino acid sequence is selected from 1740-1746, 1841-1849, and 1852. In some embodiments, the first linker polypeptide has the same amino acid sequence as the second linker polypeptide, wherein the amino acid sequence is selected from SEQ ID NOs: 1628-1683, preferably SEQ ID NOs: 1628-1630, preferably SEQ ID NO: 1630.

[1658] In some embodiments, the first polypeptide has the same amino acid sequence as the second polypeptide; and the first linker polypeptide has the same amino acid sequence as the second linker polypeptide. In some embodiments, the first polypeptide has the same amino acid sequence as the second polypeptide, wherein the amino acid sequence is selected from SEQ ID NOs: 1587-1627, 1747-1840, and 1859-1862, preferably SEQ ID NOs: 1587, 1592, 1615, 1626, 1818, 1822, 1825, or 1826, and the first linker polypeptide has the same amino acid sequence as the second linker polypeptide, wherein the amino acid sequence is selected from SEQ ID NOs: 1628-1683, 1739-1746, and 1841-1852, preferably SEQ ID NOs: 1628-1630, preferably SEQ ID NO: 1628 or SEQ ID NO: 1630.

[1659] In some embodiments, the first polypeptide has the same amino acid sequence as the second polypeptide, wherein the amino acid sequence is selected from SEQ ID NOs: 1587, 1592, 1596, 1615, and 1626, and the first linker polypeptide has the same amino acid sequence as the second linker polypeptide, wherein the amino acid sequence is selected from SEQ ID NOs: 1628-1683, preferably SEQ ID NOs: 1628-1630, preferably SEQ ID NO: 1630.

[1660] In some embodiments, the lysine residue of the first polypeptide comprising the ε-amino group that is covalently linked to the C-terminus of the first linker polypeptide is at position 21, position 24, position 28, or position 31. In some embodiments, the lysine residue of the first polypeptide comprising the ε-amino group that is covalently linked to the C-terminus of the first linker polypeptide is at position 24 or position 28. In some embodiments, the lysine residue is at position 21. In some embodiments, the lysine residue is at position 24. In some embodiments, the lysine residue is at position 28. In some embodiments, the lysine residue is at position 31.

[1661] In some embodiments, the lysine residue of the second polypeptide comprising the ε-amino group that is covalently linked to the C-terminus of the second linker polypeptide is at position 24 or position 28. In some embodiments, the lysine residue is at position 24. In some embodiments, the lysine residue is at position 28.

[1662] In some embodiments, the lysine residue of the first polypeptide comprising the ε-amino group that is covalently linked to the C-terminus of the first linker polypeptide is at position 24 or position 28; and the lysine residue of the second polypeptide comprising the ε-amino group that is covalently linked to the C-terminus of the second linker polypeptide is at position 24 or position 28.

[1663] In some embodiments, the lysine residue of the first polypeptide comprising the ε-amino group that is covalently linked to the C-terminus of the first linker polypeptide is at position 21; and the lysine residue of the second polypeptide comprising the ε-amino group that is covalently linked to the C-terminus of the second linker polypeptide is at position 21.

[1664] In some embodiments, the lysine residue of the first polypeptide comprising the ε-amino group that is covalently linked to the C-terminus of the first linker polypeptide is at position 24; and the lysine residue of the second polypeptide comprising the ε-amino group that is covalently linked to the C-terminus of the second linker polypeptide is at position 24.

[1665] In some embodiments, the lysine residue of the first polypeptide comprising the ε-amino group that is covalently linked to the C-terminus of the first linker polypeptide is at position 28; and the lysine residue of the second polypeptide comprising the ε-amino group that is covalently linked to the C-terminus of the second linker polypeptide is at position 28.

[1666] In some embodiments, the lysine residue of the first polypeptide comprising the ε-amino group that is covalently linked to the C-terminus of the first linker polypeptide is at position 31; and the lysine residue of the second polypeptide comprising the ε-amino group that is covalently linked to the C-terminus of the second linker polypeptide is at position 31.

[1667] In some embodiments, the cysteine residues of the antibody that are conjugated to the N-termini of the first linker polypeptide and the second linker polypeptide are at positions selected from the group consisting of 88 of both light chains, 384 of both heavy chains, and 487 of both heavy chains, according to AHo numbering.

[1668] In some embodiments, the cysteine residues of the antibody that are conjugated to the N-termini of the first linker polypeptide and the second linker polypeptide are at positions 384 of both heavy chains, according to AHo numbering.

[1669] In some embodiments, the lysine residue of the first polypeptide comprising the ε-amino group that is covalently linked to the C-terminus of the first linker polypeptide is at position 24; the lysine residue of the second polypeptide comprising the ε-amino group that is covalently linked to the C-terminus of the second linker polypeptide is at position 24; and the cysteine residues of the antibody that are conjugated to the N-termini of the first linker polypeptide and the second linker polypeptide are at positions 384 of both heavy chains, according to AHo numbering.

[1670] In some embodiments, the lysine residue of the first polypeptide comprising the ε-amino group that is covalently linked to the C-terminus of the first linker polypeptide is at position 28; the lysine residue of the second polypeptide comprising the ε-amino group that is covalently linked to the C-terminus of the second linker polypeptide is at position 28; and the cysteine residues of the antibody that are conjugated to the N-termini of the first linker polypeptide and the second linker polypeptide are at positions 384 of both heavy chains, according to AHo numbering.

[1671] Also provided herein is a molecule comprising:
[1672] a polypeptide that agonizes a glucagon receptor (“GCGR”) comprising the amino acid sequence of any one of SEQ ID NOs: 1587-1627, 1747-1749, 1751-1792, 1794-1798, 1801-1830, 1833-1840, 1859-1862, or 1879-1881;
[1673] a linker polypeptide comprising the amino acid sequence of any one of SEQ ID NOs: 1628-1683, 1739-1746, or 1841-1852 (e.g., SEQ ID NOs: 1628-1683, 1739, 1850, or 1851; SEQ ID NOs: 1628-1630); and
[1674] an antibody that specifically binds to a glucose-dependent insulinotropic polypeptide receptor (“GIPR”), wherein the antibody comprises a CDRL1, a CDRL2, a CDRL3, a CDRH1, a CDRH2, and a CDRH3, wherein the CDRL1, the CDRL2, the CDRL3, the CDRH1, the CDRH2, and the CDRH3 comprise the amino acid sequences of SEQ ID NO: 702, SEQ ID NO: 859, SEQ ID NO: 1016, SEQ ID NO: 1173, SEQ ID NO: 1330, and SEQ ID NO: 1487, respectively,
[1675] wherein:
   [1676] an ε-amino group of a lysine residue at position 21, position 24, position 28, or position 31 of the polypeptide is covalently linked to a C-terminus of the linker polypeptide; and
   [1677] an N-terminus of the linker polypeptide is conjugated to a cysteine residue of the antibody.

[1678] In some embodiments, the linker polypeptide comprises an amino acid sequence selected from SEQ ID NOs: 1628-1683, 1739, 1850, and 1851.

[1679] In some embodiments, the polypeptide comprises the amino acid sequence of any one of SEQ ID NOs: 1587-1627, 1747-1749, 1751-1788, 1790-1792, 1794-1798, 1801-1830, 1833-1840, 1859, 1861, or 1862, and an ε-amino group of a lysine residue at position 24 or position 28 of the polypeptide is covalently linked to a C-terminus of the linker polypeptide.

[1680] In some embodiments, the polypeptide comprises the amino acid sequence of any one of SEQ ID NOs: 1589, 1592, 1594, 1597, 1598, 1613, 1625, 1762, 1766-1768, 1787, 1788, 1797, 1798, 1804, 1805, 1811, 1812, 1821, 1822, 1833, 1837, or 1838, and an ε-amino group of a lysine residue at position 24 of the polypeptide is covalently linked to a C-terminus of the linker polypeptide.

[1681] In some embodiments, the polypeptide comprises the amino acid sequence of any one of SEQ ID NOs: 1587, 1588, 1590, 1591, 1593, 1595, 1596, 1599-1612, 1614-1624, 1626, 1627, 1747-1749, 1751-1761, 1763-1765, 1769-1786, 1790-1792, 1794-1796, 1801-1803, 1806-1810, 1813-1820, 1823-1830, 1834-1836, 1839, 1840, 1859, 1861, or 1862, and an ε-amino group of a lysine residue at position 28 of the polypeptide is covalently linked to a C-terminus of the linker polypeptide.

[1682] In some embodiments, the antibody comprises a light chain variable region comprising the amino acid sequence of SEQ ID NO: 74 and a heavy chain variable region comprising the amino acid sequence of SEQ ID NO: 231.

[1683] In some embodiments, an N-terminus of the linker polypeptide is conjugated to a cysteine residue of the antibody at a position selected from 88 of a light chain, 384 of a heavy chain, and 487 of a heavy chain, according to AHo numbering.

[1684] In some embodiments, an N-terminus of the linker polypeptide is conjugated to a cysteine residue at position 275 of the heavy chain of the antibody.

[1685] In some embodiments, the antibody comprises a light chain and a heavy chain, wherein the light chain comprises the amino acid sequence of SEQ ID NO: 388 and the heavy chain comprises the amino acid sequence of SEQ ID NO: 1571.

[1686] In some embodiments, the antibody comprises a light chain and a heavy chain, wherein the light chain comprises the amino acid sequence of SEQ ID NO: 388 and the heavy chain comprises the amino acid sequence of SEQ ID NO: 1571, and an N-terminus of the linker polypeptide is conjugated to a cysteine residue at position 275 of the heavy chain of the antibody.

[1687] Also provided herein is a molecule comprising:
[1688] a polypeptide that agonizes a glucagon receptor (“GCGR”) comprising the amino acid sequence of any one of SEQ ID NOs: 1587-1627 or 1747;
[1689] a linker polypeptide comprising the amino acid sequence of any one of SEQ ID NOs: 1628-1683 (e.g., SEQ ID NOs: 1628-1630); and
[1690] an antibody that specifically binds to a glucose-dependent insulinotropic polypeptide receptor (“GIPR”), wherein the antibody comprises a CDRL1, a CDRL2, a CDRL3, a CDRH1, a CDRH2, and a CDRH3, wherein the CDRL1, the CDRL2, the CDRL3, the CDRH1, the CDRH2, and the CDRH3 comprise the amino acid sequences of SEQ ID NO: 702, SEQ ID NO: 859, SEQ ID NO: 1016, SEQ ID NO: 1173, SEQ ID NO: 1330, and SEQ ID NO: 1487, respectively,
[1691] wherein:
   [1692] an ε-amino group of a lysine residue at position 24 or position 28 of the polypeptide is covalently linked to a C-terminus of the linker polypeptide; and
   [1693] an N-terminus of the linker polypeptide is conjugated to a cysteine residue of the antibody.

[1694] In some embodiments, the antibody comprises a light chain variable region comprising the amino acid sequence of SEQ ID NO: 74 and a heavy chain variable region comprising the amino acid sequence of SEQ ID NO: 231.

[1695] In some embodiments, an N-terminus of the linker polypeptide is conjugated to a cysteine residue of the antibody at a position selected from 88 of a light chain, 384 of a heavy chain, and 487 of a heavy chain, according to AHo numbering.

[1696] In some embodiments, an N-terminus of the linker polypeptide is conjugated to a cysteine residue at position 275 of the heavy chain of the antibody.

[1697] In some embodiments, the antibody comprises a light chain and a heavy chain, wherein the light chain comprises the amino acid sequence of SEQ ID NO: 388 and the heavy chain comprises the amino acid sequence of SEQ ID NO: 1571.

[1698] In some embodiments, the antibody comprises a light chain and a heavy chain, wherein the light chain comprises the amino acid sequence of SEQ ID NO: 388 and the heavy chain comprises the amino acid sequence of SEQ ID NO: 1571, and an N-terminus of the linker polypeptide is conjugated to a cysteine residue at position 275 of the heavy chain of the antibody.

[1699] Also provided herein is a molecule comprising:
[1700] a polypeptide that agonizes a glucagon receptor (“GCGR”) comprising the amino acid sequence of any one of SEQ ID NOs: 1587-1627 (e.g., SEQ ID NOs: 1587, 1592, 1596, 1615, or 1626);
[1701] a linker polypeptide comprising the amino acid sequence of any one of SEQ ID NOs: 1628-1683 (e.g., SEQ ID NOs: 1628-1630); and
[1702] an antibody that specifically binds to a glucose-dependent insulinotropic polypeptide receptor (“GIPR”), wherein the antibody comprises a CDRL1, a CDRL2, a CDRL3, a CDRH1, a CDRH2, and a CDRH3, wherein the CDRL1, the CDRL2, the CDRL3, the CDRH1, the CDRH2, and the CDRH3 comprise the amino acid sequences of SEQ ID NO: 702, SEQ ID NO: 859, SEQ ID NO: 1016, SEQ ID NO: 1173, SEQ ID NO: 1330, and SEQ ID NO: 1487, respectively,
[1703] wherein:
   [1704] an ε-amino group of a lysine residue at position 24 or position 28 of the polypeptide is covalently linked to a C-terminus of the linker polypeptide; and
   [1705] an N-terminus of the linker polypeptide is conjugated to a cysteine residue of the antibody.

[1706] In some embodiments, the antibody comprises a light chain variable region comprising the amino acid sequence of SEQ ID NO: 74 and a heavy chain variable region comprising the amino acid sequence of SEQ ID NO: 231.

[1707] In some embodiments, an N-terminus of the linker polypeptide is conjugated to a cysteine residue of the antibody at a position selected from 88 of a light chain, 384 of a heavy chain, and 487 of a heavy chain, according to AHo numbering.

[1708] In some embodiments, an N-terminus of the linker polypeptide is conjugated to a cysteine residue at position 275 of the heavy chain of the antibody.

[1709] In some embodiments, the antibody comprises a light chain and a heavy chain, wherein the light chain comprises the amino acid sequence of SEQ ID NO: 388 and the heavy chain comprises the amino acid sequence of SEQ ID NO: 1571.

[1710] In some embodiments, the antibody comprises a light chain and a heavy chain, wherein the light chain comprises the amino acid sequence of SEQ ID NO: 388 and the heavy chain comprises the amino acid sequence of SEQ ID NO: 1571, and an N-terminus of the linker polypeptide is conjugated to a cysteine residue at position 275 of the heavy chain of the antibody.

[1711] Also provided herein is a molecule comprising:
[1712] a first polypeptide and a second polypeptide that agonize a glucagon receptor (“GCGR”), wherein each of the first polypeptide and the second polypeptide comprise an amino acid sequence independently selected from SEQ ID NOs: 1587-1627, 1747-1749, 1751-1792, 1794-1798, 1801-1830, 1833-1840, and 1859-1862;
[1713] a first linker polypeptide and a second linker polypeptide, wherein each of the first linker polypeptide and the second linker polypeptide comprise an amino acid sequence selected from SEQ ID NOs: 1628-1683, 1739-1746, and 1841-1852 (e.g., SEQ ID NOs: 1628-1683; SEQ ID NOs: 1628-1630); and
[1714] an antibody that specifically binds to a glucose-dependent insulinotropic polypeptide receptor (“GIPR”), wherein the antibody comprises a first light chain and a second light chain, each comprising a CDRL1, a CDRL2, and a CDRL3, wherein the CDRL1, the CDRL2, and the CDRL3 comprise the amino acid sequences of SEQ ID NO: 702, SEQ ID NO: 859, and SEQ ID NO: 1016, respectively, and a first heavy chain and a second heavy chain, each comprising a CDRH1, a CDRH2, and a CDRH3, wherein the CDRH1, the CDRH2, and the CDRH3 comprise SEQ ID NO: 1173, SEQ ID NO: 1330, and SEQ ID NO: 1487, respectively,
[1715] wherein:
   [1716] an ε-amino group of a lysine residue at position 21, position 24, position 28, or position 31 of the first polypeptide is covalently linked to a C-terminus of the first linker polypeptide;
   [1717] an N-terminus of the first linker polypeptide is conjugated to a cysteine residue of the first heavy chain of the antibody;
   [1718] an ε-amino group of a lysine residue at position 21, position 24, position 28, or position 31 of the second polypeptide is covalently linked to a C-terminus of the second linker polypeptide; and
   [1719] an N-terminus of the second linker polypeptide is conjugated to a cysteine residue of the second heavy chain of the antibody.

[1720] In some embodiments, each of the first linker polypeptide and the second linker polypeptide comprise an amino acid sequence selected from SEQ ID NOs: 1628-1683, 1739, 1850, and 1851.

[1721] In some embodiments, each of the first polypeptide and the second polypeptide comprise an amino acid sequence independently selected from SEQ ID NOs: 1589, 1592, 1594, 1597, 1598, 1613, 1625, 1762, 1766-1768, 1787, 1788, 1797, 1798, 1804, 1805, 1811, 1812, 1821, 1822, 1833, 1837, and 1838, the ε-amino group of a lysine residue at position 24 of the first polypeptide is covalently linked to a C-terminus of the first linker polypeptide, and the ε-amino group of a lysine residue at position 24 of the second polypeptide is covalently linked to a C-terminus of the second linker polypeptide.

[1722] In some embodiments, each of the first polypeptide and the second polypeptide comprise an amino acid sequence independently selected from SEQ ID NOs: 1587, 1588, 1590, 1591, 1593, 1595, 1596, 1599-1612, 1614-1624, 1626, 1627, 1747-1749, 1751-1761, 1763-1765, 1769-1786, 1790-1792, 1794-1796, 1801-1803, 1806-1810, 1813-1820, 1823-1830, 1834-1836, 1839, 1840, 1859, 1861, and 1862, the ε-amino group of a lysine residue at position 28 of the first polypeptide is covalently linked to a C-terminus of the first linker polypeptide, and the ε-amino group of a lysine residue at position 28 of the second polypeptide is covalently linked to a C-terminus of the second linker polypeptide.

[1723] In some embodiments, the first light chain and the second light chain each comprise a light chain variable region comprising the amino acid sequence of SEQ ID NO: 74.

[1724] In some embodiments, the first heavy chain and the second heavy chain each comprise a heavy chain variable region comprising the amino acid sequence of SEQ ID NO: 231.

[1725] In some embodiments, the first light chain and the second light chain each comprise a light chain variable region comprising the amino acid sequence of SEQ ID NO: 74, and the first heavy chain and the second heavy chain each comprise a heavy chain variable region comprising the amino acid sequence of SEQ ID NO: 231.

[1726] In some embodiments, an N-terminus of the first linker polypeptide is conjugated to a cysteine residue of the antibody at a position selected from 88 of the first light chain, 384 of the first heavy chain, and 487 of the first heavy chain, according to AHo numbering.

[1727] In some embodiments, an N-terminus of the second linker polypeptide is conjugated to a cysteine residue of the antibody at a position selected from 88 of the second light chain, 384 of the second heavy chain, and 487 of the second heavy chain, according to AHo numbering.

[1728] In some embodiments, an N-terminus of the first linker polypeptide is conjugated to a cysteine residue of the antibody at a position selected from 88 of the first light chain, 384 of the first heavy chain, and 487 of the first heavy chain, according to AHo numbering, and an N-terminus of the second linker polypeptide is conjugated to a cysteine residue of the antibody at a position selected from 88 of the second light chain, 384 of the second heavy chain, and 487 of the second heavy chain, according to AHo numbering.

[1729] In some embodiments, the cysteine residues of the antibody that are conjugated to the N-termini of the first linker polypeptide and the second linker polypeptide are at positions 384 of the first heavy chain and the second heavy chain, respectively, according to AHo numbering.

[1730] In some embodiments, the first light chain and the second light chain each comprise the amino acid sequence of SEQ ID NO: 388.

[1731] In some embodiments, the first heavy chain and the second heavy chain each comprise the amino acid sequence of SEQ ID NO: 1571.

[1732] In some embodiments, the first light chain and the second light chain each comprise the amino acid sequence of SEQ ID NO: 388, and the first heavy chain and the second heavy chain each comprise the amino acid sequence of SEQ ID NO: 1571.

[1733] In some embodiments, an N-terminus of the first linker polypeptide is conjugated to a cysteine residue at position 275 of the first heavy chain of the antibody.

[1734] In some embodiments, an N-terminus of the second linker polypeptide is conjugated to a cysteine residue at position 275 of the second heavy chain of the antibody.

[1735] In some embodiments, an N-terminus of the first linker polypeptide is conjugated to a cysteine residue at position 275 of the first heavy chain of the antibody, and an N-terminus of the second linker polypeptide is conjugated to a cysteine residue at position 275 of the second heavy chain of the antibody.

[1736] In some embodiments, the first light chain and the second light chain each comprise the amino acid sequence of SEQ ID NO: 388, the first heavy chain and the second heavy chain each comprise the amino acid sequence of SEQ ID NO: 1571, an N-terminus of the first linker polypeptide is conjugated to a cysteine residue at position 275 of the first heavy chain of the antibody, and an N-terminus of the second linker polypeptide is conjugated to a cysteine residue at position 275 of the second heavy chain of the antibody.

[1737] In some embodiments, the first polypeptide and the second polypeptide have identical amino acid sequences. In some embodiments, the first linker polypeptide and the second linker polypeptide have identical amino acid sequences. In some embodiments, the first polypeptide and the second polypeptide have identical amino acid sequences, and the first linker polypeptide and the second linker polypeptide have identical amino acid sequences.

[1738] Also provided herein is a molecule comprising:
[1739] a first polypeptide and a second polypeptide that agonize a glucagon receptor (“GCGR”), wherein each of the first polypeptide and the second polypeptide comprise an amino acid sequence independently selected from SEQ ID NOs: 1587-1627 or 1747;
[1740] a first linker polypeptide and a second linker polypeptide, wherein each of the first linker polypeptide and the second linker polypeptide comprise an amino acid sequence selected from SEQ ID NOs: 1628-1683 (e.g., SEQ ID NOs: 1628-1630); and
[1741] an antibody that specifically binds to a glucose-dependent insulinotropic polypeptide receptor (“GIPR”), wherein the antibody comprises a first light chain and a second light chain, each comprising a CDRL1, a CDRL2, and a CDRL3, wherein the CDRL1, the CDRL2, and the CDRL3 comprise the amino acid sequences of SEQ ID NO: 702, SEQ ID NO: 859, and SEQ ID NO: 1016, respectively, and a first heavy chain and a second heavy chain, each comprising a CDRH1, a CDRH2, and a CDRH3, wherein the CDRH1, the CDRH2, and the CDRH3 comprise SEQ ID NO: 1173, SEQ ID NO: 1330, and SEQ ID NO: 1487, respectively,
[1742] wherein:
   [1743] an ε-amino group of a lysine residue at position 24 or position 28 of the first polypeptide is covalently linked to a C-terminus of the first linker polypeptide;
   [1744] an N-terminus of the first linker polypeptide is conjugated to a cysteine residue of the first heavy chain of the antibody;
   [1745] an ε-amino group of a lysine residue at position 24 or position 28 of the second polypeptide is covalently linked to a C-terminus of the second linker polypeptide; and
   [1746] an N-terminus of the second linker polypeptide is conjugated to a cysteine residue of the second heavy chain of the antibody.

[1747] In some embodiments, the first light chain and the second light chain each comprise a light chain variable region comprising the amino acid sequence of SEQ ID NO: 74.

[1748] In some embodiments, the first heavy chain and the second heavy chain each comprise a heavy chain variable region comprising the amino acid sequence of SEQ ID NO: 231.

[1749] In some embodiments, the first light chain and the second light chain each comprise a light chain variable region comprising the amino acid sequence of SEQ ID NO: 74, and the first heavy chain and the second heavy chain each comprise a heavy chain variable region comprising the amino acid sequence of SEQ ID NO: 231.

[1750] In some embodiments, an N-terminus of the first linker polypeptide is conjugated to a cysteine residue of the antibody at a position selected from 88 of the first light chain, 384 of the first heavy chain, and 487 of the first heavy chain, according to AHo numbering.

[1751] In some embodiments, an N-terminus of the second linker polypeptide is conjugated to a cysteine residue of the antibody at a position selected from 88 of the second light chain, 384 of the second heavy chain, and 487 of the second heavy chain, according to AHo numbering.

[1752] In some embodiments, an N-terminus of the first linker polypeptide is conjugated to a cysteine residue of the antibody at a position selected from 88 of the first light chain, 384 of the first heavy chain, and 487 of the first heavy chain, according to AHo numbering, and an N-terminus of the second linker polypeptide is conjugated to a cysteine residue of the antibody at a position selected from 88 of the second light chain, 384 of the second heavy chain, and 487 of the second heavy chain, according to AHo numbering.

[1753] In some embodiments, the cysteine residues of the antibody that are conjugated to the N-termini of the first linker polypeptide and the second linker polypeptide are at positions 384 of the first heavy chain and the second heavy chain, respectively, according to AHo numbering.

[1754] In some embodiments, the first light chain and the second light chain each comprise the amino acid sequence of SEQ ID NO: 388.

[1755] In some embodiments, the first heavy chain and the second heavy chain each comprise the amino acid sequence of SEQ ID NO: 1571.

[1756] In some embodiments, the first light chain and the second light chain each comprise the amino acid sequence of SEQ ID NO: 388, and the first heavy chain and the second heavy chain each comprise the amino acid sequence of SEQ ID NO: 1571.

[1757] In some embodiments, an N-terminus of the first linker polypeptide is conjugated to a cysteine residue at position 275 of the first heavy chain of the antibody.

[1758] In some embodiments, an N-terminus of the second linker polypeptide is conjugated to a cysteine residue at position 275 of the second heavy chain of the antibody.

[1759] In some embodiments, an N-terminus of the first linker polypeptide is conjugated to a cysteine residue at position 275 of the first heavy chain of the antibody, and an N-terminus of the second linker polypeptide is conjugated to a cysteine residue at position 275 of the second heavy chain of the antibody.

[1760] In some embodiments, the first light chain and the second light chain each comprise the amino acid sequence of SEQ ID NO: 388, the first heavy chain and the second heavy chain each comprise the amino acid sequence of SEQ ID NO: 1571, an N-terminus of the first linker polypeptide is conjugated to a cysteine residue at position 275 of the first heavy chain of the antibody, and an N-terminus of the second linker polypeptide is conjugated to a cysteine residue at position 275 of the second heavy chain of the antibody.

[1761] In some embodiments, the first polypeptide and the second polypeptide have identical amino acid sequences. In some embodiments, the first linker polypeptide and the second linker polypeptide have identical amino acid sequences. In some embodiments, the first polypeptide and the second polypeptide have identical amino acid sequences, and the first linker polypeptide and the second linker polypeptide have identical amino acid sequences.

[1762] Also provided herein is a molecule comprising:
[1763] a first polypeptide and a second polypeptide that agonize a glucagon receptor (“GCGR”), wherein each of the first polypeptide and the second polypeptide comprise an amino acid sequence independently selected from SEQ ID NOs: 1587-1627 (e.g., SEQ ID NOs: 1587, 1592, 1596, 1615, or 1626);
[1764] a first linker polypeptide and a second linker polypeptide, wherein each of the first linker polypeptide and the second linker polypeptide comprise an amino acid sequence selected from SEQ ID NOs: 1628-1683 (e.g., SEQ ID NOs: 1628-1630); and
[1765] an antibody that specifically binds to a glucose-dependent insulinotropic polypeptide receptor (“GIPR”), wherein the antibody comprises a first light chain and a second light chain, each comprising a CDRL1, a CDRL2, and a CDRL3, wherein the CDRL1, the CDRL2, and the CDRL3 comprise the amino acid sequences of SEQ ID NO: 702, SEQ ID NO: 859, and SEQ ID NO: 1016, respectively, and a first heavy chain and a second heavy chain, each comprising a CDRH1, a CDRH2, and a CDRH3, wherein the CDRH1, the CDRH2, and the CDRH3 comprise SEQ ID NO: 1173, SEQ ID NO: 1330, and SEQ ID NO: 1487, respectively,
[1766] wherein:
   [1767] an ε-amino group of a lysine residue at position 24 or position 28 of the first polypeptide is covalently linked to a C-terminus of the first linker polypeptide;
   [1768] an N-terminus of the first linker polypeptide is conjugated to a cysteine residue of the first heavy chain of the antibody;
   [1769] an ε-amino group of a lysine residue at position 24 or position 28 of the second polypeptide is covalently linked to a C-terminus of the second linker polypeptide; and
   [1770] an N-terminus of the second linker polypeptide is conjugated to a cysteine residue of the second heavy chain of the antibody.

[1771] In some embodiments, the first light chain and the second light chain each comprise a light chain variable region comprising the amino acid sequence of SEQ ID NO: 74.

[1772] In some embodiments, the first heavy chain and the second heavy chain each comprise a heavy chain variable region comprising the amino acid sequence of SEQ ID NO: 231.

[1773] In some embodiments, the first light chain and the second light chain each comprise a light chain variable region comprising the amino acid sequence of SEQ ID NO: 74, and the first heavy chain and the second heavy chain each comprise a heavy chain variable region comprising the amino acid sequence of SEQ ID NO: 231.

[1774] In some embodiments, an N-terminus of the first linker polypeptide is conjugated to a cysteine residue of the antibody at a position selected from 88 of the first light chain, 384 of the first heavy chain, and 487 of the first heavy chain, according to AHo numbering.

[1775] In some embodiments, an N-terminus of the second linker polypeptide is conjugated to a cysteine residue of the antibody at a position selected from 88 of the second light chain, 384 of the second heavy chain, and 487 of the second heavy chain, according to AHo numbering.

[1776] In some embodiments, an N-terminus of the first linker polypeptide is conjugated to a cysteine residue of the antibody at a position selected from 88 of the first light chain, 384 of the first heavy chain, and 487 of the first heavy chain, according to AHo numbering, and an N-terminus of the second linker polypeptide is conjugated to a cysteine residue of the antibody at a position selected from 88 of the second light chain, 384 of the second heavy chain, and 487 of the second heavy chain, according to AHo numbering.

[1777] In some embodiments, the cysteine residues of the antibody that are conjugated to the N-termini of the first linker polypeptide and the second linker polypeptide are at positions 384 of the first heavy chain and the second heavy chain, respectively, according to AHo numbering.

[1778] In some embodiments, the first light chain and the second light chain each comprise the amino acid sequence of SEQ ID NO: 388.

[1779] In some embodiments, the first heavy chain and the second heavy chain each comprise the amino acid sequence of SEQ ID NO: 1571.

[1780] In some embodiments, the first light chain and the second light chain each comprise the amino acid sequence of SEQ ID NO: 388, and the first heavy chain and the second heavy chain each comprise the amino acid sequence of SEQ ID NO: 1571.

[1781] In some embodiments, an N-terminus of the first linker polypeptide is conjugated to a cysteine residue at position 275 of the first heavy chain of the antibody.

[1782] In some embodiments, an N-terminus of the second linker polypeptide is conjugated to a cysteine residue at position 275 of the second heavy chain of the antibody.

[1783] In some embodiments, an N-terminus of the first linker polypeptide is conjugated to a cysteine residue at position 275 of the first heavy chain of the antibody, and an N-terminus of the second linker polypeptide is conjugated to a cysteine residue at position 275 of the second heavy chain of the antibody.

[1784] In some embodiments, the first light chain and the second light chain each comprise the amino acid sequence of SEQ ID NO: 388, the first heavy chain and the second heavy chain each comprise the amino acid sequence of SEQ ID NO: 1571, an N-terminus of the first linker polypeptide is conjugated to a cysteine residue at position 275 of the first heavy chain of the antibody, and an N-terminus of the second linker polypeptide is conjugated to a cysteine residue at position 275 of the second heavy chain of the antibody.

[1785] In some embodiments, the first polypeptide and the second polypeptide have identical amino acid sequences. In some embodiments, the first linker polypeptide and the second linker polypeptide have identical amino acid sequences. In some embodiments, the first polypeptide and the second polypeptide have identical amino acid sequences, and the first linker polypeptide and the second linker polypeptide have identical amino acid sequences.

[1786] Also provided herein is a molecule comprising:
[1787] a polypeptide that agonizes a glucagon receptor (“GCGR”) comprising the amino acid sequence of SEQ ID NO: 1615; a linker polypeptide comprising the amino acid sequence of SEQ ID NO: 1629; and
[1788] an antibody that specifically binds to a glucose-dependent insulinotropic polypeptide receptor (“GIPR”), wherein the antibody comprises a light chain and a heavy chain, wherein the light chain comprises the amino acid sequence of SEQ ID NO: 388 and the heavy chain comprises the amino acid sequence of SEQ ID NO: 1571,
[1789] wherein:
   [1790] an ε-amino group of a lysine residue at position 28 of the polypeptide is covalently linked to a C-terminus of the linker polypeptide; and
   [1791] an N-terminus of the linker polypeptide is conjugated to a cysteine residue at position 275 of the heavy chain of the antibody.

[1792] Also provided herein is a molecule comprising:
[1793] a polypeptide that agonizes a glucagon receptor (“GCGR”) comprising the amino acid sequence of SEQ ID NO: 1626;
[1794] a linker polypeptide comprising the amino acid sequence of SEQ ID NO: 1628; and
[1795] an antibody that specifically binds to a glucose-dependent insulinotropic polypeptide receptor (“GIPR”), wherein the antibody comprises a light chain and a heavy chain, wherein the light chain comprises the amino acid sequence of SEQ ID NO: 388 and the heavy chain comprises the amino acid sequence of SEQ ID NO: 1571,
[1796] wherein:
   [1797] an ε-amino group of a lysine residue at position 28 of the polypeptide is covalently linked to a C-terminus of the linker polypeptide; and
   [1798] an N-terminus of the linker polypeptide is conjugated to a cysteine residue at position 275 of the heavy chain of the antibody.

[1799] Also provided herein is a molecule comprising:
[1800] a polypeptide that agonizes a glucagon receptor (“GCGR”) comprising the amino acid sequence of SEQ ID NO: 1592;
[1801] a linker polypeptide comprising the amino acid sequence of SEQ ID NO: 1628; and
[1802] an antibody that specifically binds to a glucose-dependent insulinotropic polypeptide receptor (“GIPR”), wherein the antibody comprises a light chain and a heavy chain, wherein the light chain comprises the amino acid sequence of SEQ ID NO: 388 and the heavy chain comprises the amino acid sequence of SEQ ID NO: 1571,
[1803] wherein:
   [1804] an ε-amino group of a lysine residue at position 24 of the polypeptide is covalently linked to a C-terminus of the linker polypeptide; and
   [1805] an N-terminus of the linker polypeptide is conjugated to a cysteine residue at position 275 of the heavy chain of the antibody.

[1806] Also provided herein is a molecule comprising:
[1807] a polypeptide that agonizes a glucagon receptor (“GCGR”) comprising the amino acid sequence of SEQ ID NO: 1626;
[1808] a linker polypeptide comprising the amino acid sequence of SEQ ID NO: 1629; and
[1809] an antibody that specifically binds to a glucose-dependent insulinotropic polypeptide receptor (“GIPR”), wherein the antibody comprises a light chain and a heavy chain, wherein the light chain comprises the amino acid sequence of SEQ ID NO: 388 and the heavy chain comprises the amino acid sequence of SEQ ID NO: 1571,
[1810] wherein:
   [1811] an ε-amino group of a lysine residue at position 28 of the polypeptide is covalently linked to a C-terminus of the linker polypeptide; and
   [1812] an N-terminus of the linker polypeptide is conjugated to a cysteine residue at position 275 of the heavy chain of the antibody.

[1813] Also provided herein is a molecule comprising:
[1814] a polypeptide that agonizes a glucagon receptor (“GCGR”) comprising the amino acid sequence of SEQ ID NO: 1587;
[1815] a linker polypeptide comprising the amino acid sequence of SEQ ID NO: 1628; and
[1816] an antibody that specifically binds to a glucose-dependent insulinotropic polypeptide receptor (“GIPR”), wherein the antibody comprises a light chain and a heavy chain, wherein the light chain comprises the amino acid sequence of SEQ ID NO: 388 and the heavy chain comprises the amino acid sequence of SEQ ID NO: 1571,
[1817] wherein:
   [1818] an ε-amino group of a lysine residue at position 28 of the polypeptide is covalently linked to a C-terminus of the linker polypeptide; and
   [1819] an N-terminus of the linker polypeptide is conjugated to a cysteine residue at position 275 of the heavy chain of the antibody.

[1820] Also provided herein is a molecule comprising:
[1821] a polypeptide that agonizes a glucagon receptor (“GCGR”) comprising the amino acid sequence of SEQ ID NO: 1587;
[1822] a linker polypeptide comprising the amino acid sequence of SEQ ID NO: 1630; and
[1823] an antibody that specifically binds to a glucose-dependent insulinotropic polypeptide receptor (“GIPR”), wherein the antibody comprises a light chain and a heavy chain, wherein the light chain comprises the amino acid sequence of SEQ ID NO: 388 and the heavy chain comprises the amino acid sequence of SEQ ID NO: 1571,
[1824] wherein:
   [1825] an ε-amino group of a lysine residue at position 28 of the polypeptide is covalently linked to a C-terminus of the linker polypeptide; and
   [1826] an N-terminus of the linker polypeptide is conjugated to a cysteine residue at position 275 of the heavy chain of the antibody.

[1827] Also provided herein is a molecule comprising:
[1828] a polypeptide that agonizes a glucagon receptor (“GCGR”) comprising the amino acid sequence of SEQ ID NO: 1822;
[1829] a linker polypeptide comprising the amino acid sequence of SEQ ID NO: 1628; and
[1830] an antibody that specifically binds to a glucose-dependent insulinotropic polypeptide receptor (“GIPR”), wherein the antibody comprises a light chain and a heavy chain, wherein the light chain comprises the amino acid sequence of SEQ ID NO: 388 and the heavy chain comprises the amino acid sequence of SEQ ID NO: 1571,
[1831] wherein:
   [1832] an ε-amino group of a lysine residue at position 24 of the polypeptide is covalently linked to a C-terminus of the linker polypeptide; and
   [1833] an N-terminus of the linker polypeptide is conjugated to a cysteine residue at position 275 of the heavy chain of the antibody.

[1834] Also provided herein is a molecule comprising:
[1835] a polypeptide that agonizes a glucagon receptor (“GCGR”) comprising the amino acid sequence of SEQ ID NO: 1825;
[1836] a linker polypeptide comprising the amino acid sequence of SEQ ID NO: 1628; and
[1837] an antibody that specifically binds to a glucose-dependent insulinotropic polypeptide receptor (“GIPR”), wherein the antibody comprises a light chain and a heavy chain, wherein the light chain comprises the amino acid sequence of SEQ ID NO: 388 and the heavy chain comprises the amino acid sequence of SEQ ID NO: 1571,
[1838] wherein:
   [1839] an ε-amino group of a lysine residue at position 28 of the polypeptide is covalently linked to a C-terminus of the linker polypeptide; and
   [1840] an N-terminus of the linker polypeptide is conjugated to a cysteine residue at position 275 of the heavy chain of the antibody.

[1841] Also provided herein is a molecule comprising:
[1842] a polypeptide that agonizes a glucagon receptor (“GCGR”) comprising the amino acid sequence of SEQ ID NO: 1826;
[1843] a linker polypeptide comprising the amino acid sequence of SEQ ID NO: 1628; and
[1844] an antibody that specifically binds to a glucose-dependent insulinotropic polypeptide receptor (“GIPR”), wherein the antibody comprises a light chain and a heavy chain, wherein the light chain comprises the amino acid sequence of SEQ ID NO: 388 and the heavy chain comprises the amino acid sequence of SEQ ID NO: 1571,
[1845] wherein:
   [1846] an ε-amino group of a lysine residue at position 28 of the polypeptide is covalently linked to a C-terminus of the linker polypeptide; and
   [1847] an N-terminus of the linker polypeptide is conjugated to a cysteine residue at position 275 of the heavy chain of the antibody.

[1848] Also provided herein is a molecule comprising:
[1849] a polypeptide that agonizes a glucagon receptor (“GCGR”) comprising the amino acid sequence of SEQ ID NO: 1818;
[1850] a linker polypeptide comprising the amino acid sequence of SEQ ID NO: 1628; and
[1851] an antibody that specifically binds to a glucose-dependent insulinotropic polypeptide receptor (“GIPR”), wherein the antibody comprises a light chain and a heavy chain, wherein the light chain comprises the amino acid sequence of SEQ ID NO: 388 and the heavy chain comprises the amino acid sequence of SEQ ID NO: 1571,
[1852] wherein:
   [1853] an ε-amino group of a lysine residue at position 28 of the polypeptide is covalently linked to a C-terminus of the linker polypeptide; and
   [1854] an N-terminus of the linker polypeptide is conjugated to a cysteine residue at position 275 of the heavy chain of the antibody.

[1855] Also provided herein is a molecule comprising:
[1856] a first polypeptide and a second polypeptide that agonize a glucagon receptor (“GCGR”), wherein each of the first polypeptide and the second polypeptide comprise an amino acid sequence independently selected from SEQ ID NOs: 1587-1627 or 1747; a first linker polypeptide and a second linker polypeptide, wherein each of the first linker polypeptide and the second linker polypeptide comprise an amino acid sequence selected from SEQ ID NOs: 1628-1683 (e.g., SEQ ID NOs: 1628-1630); and
[1857] an antibody that specifically binds to a glucose-dependent insulinotropic polypeptide receptor (“GIPR”), wherein the antibody comprises a first light chain and a second light chain, wherein the first light chain and the second light chain each comprise the amino acid sequence of SEQ ID NO: 388, and a first heavy chain and a second heavy chain, wherein the first heavy chain and the second heavy chain each comprise the amino acid sequence of SEQ ID NO: 1571,
[1858] wherein:
   [1859] an ε-amino group of a lysine residue at position 24 or position 28 of the first polypeptide is covalently linked to a C-terminus of the first linker polypeptide;
   [1860] an N-terminus of the first linker polypeptide is conjugated to a cysteine residue at position 275 of the first heavy chain of the antibody;
   [1861] an ε-amino group of a lysine residue at position 24 or position 28 of the second polypeptide is covalently linked to a C-terminus of the second linker polypeptide; and
   [1862] an N-terminus of the second linker polypeptide is conjugated to a cysteine residue at position 275 of the second heavy chain of the antibody.

[1863] In some embodiments, the first polypeptide and the second polypeptide have identical amino acid sequences. In some embodiments, the first linker polypeptide and the second linker polypeptide have identical amino acid sequences. In some embodiments, the first polypeptide and the second polypeptide have identical amino acid sequences, and the first linker polypeptide and the second linker polypeptide have identical amino acid sequences.

[1864] Also provided herein is a molecule comprising:
[1865] a first polypeptide and a second polypeptide that agonize a glucagon receptor (“GCGR”), wherein each of the first polypeptide and the second polypeptide comprise an amino acid sequence independently selected from SEQ ID NOs: 1587-1627, 1747-1749, 1751-1792, 1794-1798, 1801-1830, 1833-1840, and 1859-1862;
[1866] a first linker polypeptide and a second linker polypeptide, wherein each of the first linker polypeptide and the second linker polypeptide comprise an amino acid sequence selected from SEQ ID NOs: 1628-1683, 1739-1746, and 1841-1852; and
[1867] an antibody that specifically binds to a glucose-dependent insulinotropic polypeptide receptor (“GIPR”), wherein the antibody comprises a first light chain and a second light chain, wherein the first light chain and the second light chain each comprise the amino acid sequence of SEQ ID NO: 388, and a first heavy chain and a second heavy chain, wherein the first heavy chain and the second heavy chain each comprise the amino acid sequence of SEQ ID NO: 1571,
[1868] wherein:
   [1869] an ε-amino group of a lysine residue at position 21, position 24, position 28, or position 31 of the first polypeptide is covalently linked to a C-terminus of the first linker polypeptide;
   [1870] an N-terminus of the first linker polypeptide is conjugated to a cysteine residue at position 275 of the first heavy chain of the antibody;
   [1871] an ε-amino group of a lysine residue at position 21, position 24, position 28, or position 31 of the second polypeptide is covalently linked to a C-terminus of the second linker polypeptide; and
   [1872] an N-terminus of the second linker polypeptide is conjugated to a cysteine residue at position 275 of the second heavy chain of the antibody.

[1873] In some embodiments, each of the first linker polypeptide and the second linker polypeptide comprise an amino acid sequence selected from SEQ ID NOs: 1628-1683, 1739, 1850, and 1851.

[1874] In some embodiments, the first polypeptide and the second polypeptide have identical amino acid sequences. In some embodiments, the first linker polypeptide and the second linker polypeptide have identical amino acid sequences. In some embodiments, the first polypeptide and the second polypeptide have identical amino acid sequences, and the first linker polypeptide and the second linker polypeptide have identical amino acid sequences.

[1875] In some embodiments, the first polypeptide and the second polypeptide comprise an amino acid sequence independently selected from SEQ ID NOs: 1589, 1592, 1594, 1597, 1598, 1613, 1625, 1762, 1766-1768, 1787, 1788, 1797, 1798, 1804, 1805, 1811, 1812, 1821, 1822, 1833, 1837, and 1838, the ε-amino group of the lysine residue at position 24 of the first polypeptide is covalently linked to the C-terminus of the first linker polypeptide, and the ε-amino group of the lysine residue at position 24 of the second polypeptide is covalently linked to the C-terminus of the second linker polypeptide. In some embodiments, the first polypeptide and the second polypeptide have identical amino acid sequences. In some embodiments, the first linker polypeptide and the second linker polypeptide have identical amino acid sequences. In some embodiments, the first polypeptide and the second polypeptide have identical amino acid sequences, and the first linker polypeptide and the second linker polypeptide have identical amino acid sequences.

[1876] In some embodiments, the first polypeptide and the second polypeptide comprise an amino acid sequence independently selected from SEQ ID NOs: 1587, 1588, 1590, 1591, 1593, 1595, 1596, 1599-1612, 1614-1624, 1626, 1627, 1747-1749, 1751-1761, 1763-1765, 1769-1786, 1790-1792, 1794-1796, 1801-1803, 1806-1810, 1813-1820, 1823-1830, 1834-1836, 1839, 1840, 1859, 1861, and 1862, the ε-amino group of the lysine residue at position 28 of the first polypeptide is covalently linked to the C-terminus of the first linker polypeptide, and the ε-amino group of the lysine residue at position 28 of the second polypeptide is covalently linked to the C-terminus of the second linker polypeptide. In some embodiments, the first polypeptide and the second polypeptide have identical amino acid sequences. In some embodiments, the first linker polypeptide and the second linker polypeptide have identical amino acid sequences. In some embodiments, the first polypeptide and the second polypeptide have identical amino acid sequences, and the first linker polypeptide and the second linker polypeptide have identical amino acid sequences.

[1877] In some embodiments, the first polypeptide and the second polypeptide comprise an amino acid sequence of SEQ ID NO: 1860, the ε-amino group of the lysine residue at position 21 of the first polypeptide is covalently linked to the C-terminus of the first linker polypeptide, and the ε-amino group of the lysine residue at position 21 of the second polypeptide is covalently linked to the C-terminus of the second linker polypeptide. In some embodiments, the first linker polypeptide and the second linker polypeptide have identical amino acid sequences.

[1878] In some embodiments, the first polypeptide and the second polypeptide comprise an amino acid sequence of SEQ ID NO: 1789, the ε-amino group of the lysine residue at position 31 of the first polypeptide is covalently linked to the C-terminus of the first linker polypeptide, and the ε-amino group of the lysine residue at position 31 of the second polypeptide is covalently linked to the C-terminus of the second linker polypeptide. In some embodiments, the first linker polypeptide and the second linker polypeptide have identical amino acid sequences.

[1879] Also provided herein is a molecule comprising:
[1880] a first polypeptide and a second polypeptide that agonize a glucagon receptor (“GCGR”), wherein each of the first polypeptide and the second polypeptide comprise an amino acid sequence independently selected from SEQ ID NOs: 1587-1627 (e.g., SEQ ID NOs: 1587, 1592, 1596, 1615, or 1626);
[1881] a first linker polypeptide and a second linker polypeptide, wherein each of the first linker polypeptide and the second linker polypeptide comprise an amino acid sequence selected from SEQ ID NOs: 1628-1683 (e.g., SEQ ID NOs: 1628-1630); and
[1882] an antibody that specifically binds to a glucose-dependent insulinotropic polypeptide receptor (“GIPR”), wherein the antibody comprises a first light chain and a second light chain, wherein the first light chain and the second light chain each comprise the amino acid sequence of SEQ ID NO: 388, and a first heavy chain and a second heavy chain, wherein the first heavy chain and the second heavy chain each comprise the amino acid sequence of SEQ ID NO: 1571,
[1883] wherein:
   [1884] an ε-amino group of a lysine residue at position 24 or position 28 of the first polypeptide is covalently linked to a C-terminus of the first linker polypeptide;
   [1885] an N-terminus of the first linker polypeptide is conjugated to a cysteine residue at position 275 of the first heavy chain of the antibody;
   [1886] an ε-amino group of a lysine residue at position 24 or position 28 of the second polypeptide is covalently linked to a C-terminus of the second linker polypeptide; and
   [1887] an N-terminus of the second linker polypeptide is conjugated to a cysteine residue at position 275 of the second heavy chain of the antibody.

[1888] In some embodiments, the first polypeptide and the second polypeptide have identical amino acid sequences. In some embodiments, the first linker polypeptide and the second linker polypeptide have identical amino acid sequences. In some embodiments, the first polypeptide and the second polypeptide have identical amino acid sequences, and the first linker polypeptide and the second linker polypeptide have identical amino acid sequences.

[1889] Also provided herein is a molecule comprising:
[1890] a first polypeptide and a second polypeptide that agonize a glucagon receptor (“GCGR”), wherein each of the first polypeptide and the second polypeptide comprise an amino acid sequence independently selected from SEQ ID NOs: 1587-1627, 1747-1840, and 1859-1862;
[1891] a first linker polypeptide and a second linker polypeptide, wherein each of the first linker polypeptide and the second linker polypeptide comprise an amino acid sequence selected from SEQ ID NOs: 1628-1683, 1739-1746, and 1841-1852; and
[1892] an antibody that specifically binds to a glucose-dependent insulinotropic polypeptide receptor (“GIPR”), wherein the antibody comprises a first light chain and a second light chain, wherein the first light chain and the second light chain each comprise the amino acid sequence of SEQ ID NO: 388, and a first heavy chain and a second heavy chain, wherein the first heavy chain and the second heavy chain each comprise the amino acid sequence of SEQ ID NO: 1571,
[1893] wherein:
   [1894] a C-terminal amino acid residue of the first polypeptide is covalently linked to an N-terminal amino acid residue of the first linker polypeptide;
   [1895] a C-terminal amino acid residue of the first linker polypeptide is conjugated to a cysteine residue at position 275 of the first heavy chain of the antibody;
   [1896] a C-terminal amino acid residue of the second polypeptide is covalently linked to an N-terminal amino acid residue of the second linker polypeptide; and
   [1897] a C-terminal amino acid residue of the second linker polypeptide is conjugated to a cysteine residue at position 275 of the second heavy chain of the antibody.

[1898] In some embodiments, each of the first polypeptide and the second polypeptide comprise an amino acid sequence independently selected from SEQ ID NOs: 1793, 1799, 1800, 1831, and 1832. In some embodiments, each of the first linker polypeptide and the second linker polypeptide comprise an amino acid sequence independently selected from SEQ ID NOs: 1740-1746, 1841-1849, or 1852. In some embodiments, each of the first polypeptide and the second polypeptide comprise an amino acid sequence independently selected from SEQ ID NOs: 1793, 1799, 1800, 1831, and 1832, and each of the first linker polypeptide and the second linker polypeptide comprise an amino acid sequence independently selected from SEQ ID NOs: 1740-1746, 1841-1849, or 1852.

[1899] In some embodiments, the first polypeptide and the second polypeptide have identical amino acid sequences. In some embodiments, the first linker polypeptide and the second linker polypeptide have identical amino acid sequences. In some embodiments, the first polypeptide and the second polypeptide have identical amino acid sequences, and the first linker polypeptide and the second linker polypeptide have identical amino acid sequences.

[1900] Also provided herein is a molecule comprising:
[1901] a first polypeptide and a second polypeptide that agonize a glucagon receptor (“GCGR”), wherein the first polypeptide and the second polypeptide each comprise the amino acid sequence of SEQ ID NO: 1615;
[1902] a first linker polypeptide and a second linker polypeptide, wherein the first linker polypeptide and the second linker polypeptide each comprise the amino acid sequence of SEQ ID NO: 1629; and
[1903] an antibody that specifically binds to a glucose-dependent insulinotropic polypeptide receptor (“GIPR”), wherein the antibody comprises a first light chain and a second light chain, wherein the first light chain and the second light chain each comprise the amino acid sequence of SEQ ID NO: 388, and a first heavy chain and a second heavy chain, wherein the first heavy chain and the second heavy chain each comprise the amino acid sequence of SEQ ID NO: 1571,
[1904] wherein:
   [1905] an ε-amino group of a lysine residue at position 28 of the first polypeptide is covalently linked to a C-terminus of the first linker polypeptide;
   [1906] an N-terminus of the first linker polypeptide is conjugated to a cysteine residue at position 275 of the first heavy chain of the antibody;
   [1907] an ε-amino group of a lysine residue at position 28 of the second polypeptide is covalently linked to a C-terminus of the second linker polypeptide; and
   [1908] an N-terminus of the second linker polypeptide is conjugated to a cysteine residue at position 275 of the second heavy chain of the antibody.

[1909] Also provided herein is a molecule comprising:
[1910] a first polypeptide and a second polypeptide that agonize a glucagon receptor (“GCGR”), wherein the first polypeptide and the second polypeptide each comprise the amino acid sequence of SEQ ID NO: 1626;
[1911] a first linker polypeptide and a second linker polypeptide, wherein the first linker polypeptide and the second linker polypeptide each comprise the amino acid sequence of SEQ ID NO: 1628; and
[1912] an antibody that specifically binds to a glucose-dependent insulinotropic polypeptide receptor (“GIPR”), wherein the antibody comprises a first light chain and a second light chain, wherein the first light chain and the second light chain each comprise the amino acid sequence of SEQ ID NO: 388, and a first heavy chain and a second heavy chain, wherein the first heavy chain and the second heavy chain each comprise the amino acid sequence of SEQ ID NO: 1571,
[1913] wherein:
   [1914] an ε-amino group of a lysine residue at position 28 of the first polypeptide is covalently linked to a C-terminus of the first linker polypeptide;
   [1915] an N-terminus of the first linker polypeptide is conjugated to a cysteine residue at position 275 of the first heavy chain of the antibody;
   [1916] an ε-amino group of a lysine residue at position 28 of the second polypeptide is covalently linked to a C-terminus of the second linker polypeptide; and
   [1917] an N-terminus of the second linker polypeptide is conjugated to a cysteine residue at position 275 of the second heavy chain of the antibody.

[1918] Also provided herein is a molecule comprising:
[1919] a first polypeptide and a second polypeptide that agonize a glucagon receptor (“GCGR”), wherein the first polypeptide and the second polypeptide each comprise the amino acid sequence of SEQ ID NO: 1592;
[1920] a first linker polypeptide and a second linker polypeptide, wherein the first linker polypeptide and the second linker polypeptide each comprise the amino acid sequence of SEQ ID NO: 1628; and
[1921] an antibody that specifically binds to a glucose-dependent insulinotropic polypeptide receptor (“GIPR”), wherein the antibody comprises a first light chain and a second light chain, wherein the first light chain and the second light chain each comprise the amino acid sequence of SEQ ID NO: 388, and a first heavy chain and a second heavy chain, wherein the first heavy chain and the second heavy chain each comprise the amino acid sequence of SEQ ID NO: 1571,
[1922] wherein:
   [1923] an ε-amino group of a lysine residue at position 24 of the first polypeptide is covalently linked to a C-terminus of the first linker polypeptide;
   [1924] an N-terminus of the first linker polypeptide is conjugated to a cysteine residue at position 275 of the first heavy chain of the antibody;
   [1925] an ε-amino group of a lysine residue at position 24 of the second polypeptide is covalently linked to a C-terminus of the second linker polypeptide; and
   [1926] an N-terminus of the second linker polypeptide is conjugated to a cysteine residue at position 275 of the second heavy chain of the antibody.

[1927] Also provided herein is a molecule comprising:
[1928] a first polypeptide and a second polypeptide that agonize a glucagon receptor (“GCGR”), wherein the first polypeptide and the second polypeptide each comprise the amino acid sequence of SEQ ID NO: 1626;
[1929] a first linker polypeptide and a second linker polypeptide, wherein the first linker polypeptide and the second linker polypeptide each comprise the amino acid sequence of SEQ ID NO: 1629; and
[1930] an antibody that specifically binds to a glucose-dependent insulinotropic polypeptide receptor (“GIPR”), wherein the antibody comprises a first light chain and a second light chain, wherein the first light chain and the second light chain each comprise the amino acid sequence of SEQ ID NO: 388, and a first heavy chain and a second heavy chain, wherein the first heavy chain and the second heavy chain each comprise the amino acid sequence of SEQ ID NO: 1571,
[1931] wherein:
   [1932] an ε-amino group of a lysine residue at position 28 of the first polypeptide is covalently linked to a C-terminus of the first linker polypeptide;
   [1933] an N-terminus of the first linker polypeptide is conjugated to a cysteine residue at position 275 of the first heavy chain of the antibody;
   [1934] an ε-amino group of a lysine residue at position 28 of the second polypeptide is covalently linked to a C-terminus of the second linker polypeptide; and
   [1935] an N-terminus of the second linker polypeptide is conjugated to a cysteine residue at position 275 of the second heavy chain of the antibody.

[1936] Also provided herein is a molecule comprising:
[1937] a first polypeptide and a second polypeptide that agonize a glucagon receptor (“GCGR”), wherein the first polypeptide and the second polypeptide each comprise the amino acid sequence of SEQ ID NO: 1587;
[1938] a first linker polypeptide and a second linker polypeptide, wherein the first linker polypeptide and the second linker polypeptide each comprise the amino acid sequence of SEQ ID NO: 1628; and
[1939] an antibody that specifically binds to a glucose-dependent insulinotropic polypeptide receptor (“GIPR”), wherein the antibody comprises a first light chain and a second light chain, wherein the first light chain and the second light chain each comprise the amino acid sequence of SEQ ID NO: 388, and a first heavy chain and a second heavy chain, wherein the first heavy chain and the second heavy chain each comprise the amino acid sequence of SEQ ID NO: 1571,
[1940] wherein:
   [1941] an ε-amino group of a lysine residue at position 28 of the first polypeptide is covalently linked to a C-terminus of the first linker polypeptide;
   [1942] an N-terminus of the first linker polypeptide is conjugated to a cysteine residue at position 275 of the first heavy chain of the antibody;
   [1943] an ε-amino group of a lysine residue at position 28 of the second polypeptide is covalently linked to a C-terminus of the second linker polypeptide; and
   [1944] an N-terminus of the second linker polypeptide is conjugated to a cysteine residue at position 275 of the second heavy chain of the antibody.

[1945] Also provided herein is a molecule comprising:
[1946] a first polypeptide and a second polypeptide that agonize a glucagon receptor (“GCGR”), wherein the first polypeptide and the second polypeptide each comprise the amino acid sequence of SEQ ID NO: 1587;
[1947] a first linker polypeptide and a second linker polypeptide, wherein the first linker polypeptide and the second linker polypeptide each comprise the amino acid sequence of SEQ ID NO: 1630; and
[1948] an antibody that specifically binds to a glucose-dependent insulinotropic polypeptide receptor (“GIPR”), wherein the antibody comprises a first light chain and a second light chain, wherein the first light chain and the second light chain each comprise the amino acid sequence of SEQ ID NO: 388, and a first heavy chain and a second heavy chain, wherein the first heavy chain and the second heavy chain each comprise the amino acid sequence of SEQ ID NO: 1571,
[1949] wherein:
   [1950] an ε-amino group of a lysine residue at position 28 of the first polypeptide is covalently linked to a C-terminus of the first linker polypeptide;
   [1951] an N-terminus of the first linker polypeptide is conjugated to a cysteine residue at position 275 of the first heavy chain of the antibody;
   [1952] an ε-amino group of a lysine residue at position 28 of the second polypeptide is covalently linked to a C-terminus of the second linker polypeptide; and
   [1953] an N-terminus of the second linker polypeptide is conjugated to a cysteine residue at position 275 of the second heavy chain of the antibody.

[1954] Also provided herein is a molecule comprising:
[1955] a first polypeptide and a second polypeptide that agonize a glucagon receptor (“GCGR”), wherein the first polypeptide and the second polypeptide each comprise the amino acid sequence of SEQ ID NO: 1822;
[1956] a first linker polypeptide and a second linker polypeptide, wherein the first linker polypeptide and the second linker polypeptide each comprise the amino acid sequence of SEQ ID NO: 1628; and
[1957] an antibody that specifically binds to a glucose-dependent insulinotropic polypeptide receptor (“GIPR”), wherein the antibody comprises a first light chain and a second light chain, wherein the first light chain and the second light chain each comprise the amino acid sequence of SEQ ID NO: 388, and a first heavy chain and a second heavy chain, wherein the first heavy chain and the second heavy chain each comprise the amino acid sequence of SEQ ID NO: 1571,
[1958] wherein:
   [1959] an ε-amino group of a lysine residue at position 24 of the first polypeptide is covalently linked to a C-terminus of the first linker polypeptide;
   [1960] an N-terminus of the first linker polypeptide is conjugated to a cysteine residue at position 275 of the first heavy chain of the antibody;
   [1961] an ε-amino group of a lysine residue at position 24 of the second polypeptide is covalently linked to a C-terminus of the second linker polypeptide; and
   [1962] an N-terminus of the second linker polypeptide is conjugated to a cysteine residue at position 275 of the second heavy chain of the antibody.

[1963] Also provided herein is a molecule comprising:
[1964] a first polypeptide and a second polypeptide that agonize a glucagon receptor (“GCGR”), wherein the first polypeptide and the second polypeptide each comprise the amino acid sequence of SEQ ID NO: 1825;
[1965] a first linker polypeptide and a second linker polypeptide, wherein the first linker polypeptide and the second linker polypeptide each comprise the amino acid sequence of SEQ ID NO: 1628; and
[1966] an antibody that specifically binds to a glucose-dependent insulinotropic polypeptide receptor (“GIPR”), wherein the antibody comprises a first light chain and a second light chain, wherein the first light chain and the second light chain each comprise the amino acid sequence of SEQ ID NO: 388, and a first heavy chain and a second heavy chain, wherein the first heavy chain and the second heavy chain each comprise the amino acid sequence of SEQ ID NO: 1571,
[1967] wherein:
   [1968] an ε-amino group of a lysine residue at position 28 of the first polypeptide is covalently linked to a C-terminus of the first linker polypeptide;
   [1969] an N-terminus of the first linker polypeptide is conjugated to a cysteine residue at position 275 of the first heavy chain of the antibody;
   [1970] an ε-amino group of a lysine residue at position 28 of the second polypeptide is covalently linked to a C-terminus of the second linker polypeptide; and
   [1971] an N-terminus of the second linker polypeptide is conjugated to a cysteine residue at position 275 of the second heavy chain of the antibody.

[1972] Also provided herein is a molecule comprising:
[1973] a first polypeptide and a second polypeptide that agonize a glucagon receptor (“GCGR”), wherein the first polypeptide and the second polypeptide each comprise the amino acid sequence of SEQ ID NO: 1826;
[1974] a first linker polypeptide and a second linker polypeptide, wherein the first linker polypeptide and the second linker polypeptide each comprise the amino acid sequence of SEQ ID NO: 1628; and
[1975] an antibody that specifically binds to a glucose-dependent insulinotropic polypeptide receptor (“GIPR”), wherein the antibody comprises a first light chain and a second light chain, wherein the first light chain and the second light chain each comprise the amino acid sequence of SEQ ID NO: 388, and a first heavy chain and a second heavy chain, wherein the first heavy chain and the second heavy chain each comprise the amino acid sequence of SEQ ID NO: 1571,
[1976] wherein:
   [1977] an ε-amino group of a lysine residue at position 28 of the first polypeptide is covalently linked to a C-terminus of the first linker polypeptide;
   [1978] an N-terminus of the first linker polypeptide is conjugated to a cysteine residue at position 275 of the first heavy chain of the antibody;
   [1979] an ε-amino group of a lysine residue at position 28 of the second polypeptide is covalently linked to a C-terminus of the second linker polypeptide; and
   [1980] an N-terminus of the second linker polypeptide is conjugated to a cysteine residue at position 275 of the second heavy chain of the antibody.

[1981] Also provided herein is a molecule comprising:
[1982] a first polypeptide and a second polypeptide that agonize a glucagon receptor (“GCGR”), wherein the first polypeptide and the second polypeptide each comprise the amino acid sequence of SEQ ID NO: 1818;
[1983] a first linker polypeptide and a second linker polypeptide, wherein the first linker polypeptide and the second linker polypeptide each comprise the amino acid sequence of SEQ ID NO: 1628; and
[1984] an antibody that specifically binds to a glucose-dependent insulinotropic polypeptide receptor (“GIPR”), wherein the antibody comprises a first light chain and a second light chain, wherein the first light chain and the second light chain each comprise the amino acid sequence of SEQ ID NO: 388, and a first heavy chain and a second heavy chain, wherein the first heavy chain and the second heavy chain each comprise the amino acid sequence of SEQ ID NO: 1571,
[1985] wherein:
   [1986] an ε-amino group of a lysine residue at position 28 of the first polypeptide is covalently linked to a C-terminus of the first linker polypeptide;
   [1987] an N-terminus of the first linker polypeptide is conjugated to a cysteine residue at position 275 of the first heavy chain of the antibody;
   [1988] an ε-amino group of a lysine residue at position 28 of the second polypeptide is covalently linked to a C-terminus of the second linker polypeptide; and
   [1989] an N-terminus of the second linker polypeptide is conjugated to a cysteine residue at position 275 of the second heavy chain of the antibody.

[1990] Also provided herein is a molecule that is a product of a thiol-bromoacetyl reaction between a structure as depicted in FIG. 9 and a thiol group of a cysteine residue of an anti-GIPR antibody. In some embodiments, the molecule is a product of a thiol-bromoacetyl reaction between a structure as depicted in FIG. 9 and a thiol group of a cysteine residue at position 275 of SEQ ID NO: 1571.

[1991] Also provided herein is a molecule prepared by condensing two structures as depicted in FIG. 9 with an anti-GIPR antibody comprising two heavy chains, each comprising the amino acid sequence of SEQ ID NO: 1571, and two light chains, each comprising the amino acid sequence of SEQ ID NO: 388, wherein each structure as depicted in FIG. 9 is covalently linked to the anti-GIPR antibody via a thiol-bromoacetyl reaction between its bromoacetylated N-terminus and a thiol group of a cysteine residue at position 275 of a heavy chain (one molecule per heavy chain).

[1992] Also provided herein is a molecule comprising the structure of FIG. 10, wherein the squiggly line represents a connection point between the structure of FIG. 10 and a sulfur atom of a cysteine residue of an anti-GIPR antibody.

[1993] In some embodiments, the molecule comprises the structure of FIG. 10, wherein the squiggly line represents a connection point between the structure of FIG. 10 and a sulfur atom of a cysteine residue at position 275 of SEQ ID NO: 1571.

[1994] In some embodiments, the molecule comprises:
[1995] a first structure of FIG. 10, wherein the squiggly line represents a connection point between the first structure of FIG. 10 and a sulfur atom of a cysteine residue at position 275 of a first heavy chain, wherein the first heavy chain comprises the amino acid sequence of SEQ ID NO: 1571;
[1996] a second structure of FIG. 10, wherein the squiggly line represents a connection point between the second structure of FIG. 10 and a sulfur atom of a cysteine residue at position 275 of a second heavy chain, wherein the second heavy chain comprises the amino acid sequence of SEQ ID NO: 1571; and
[1997] a first light chain and a second light chain, wherein the first light chain and the second light chain both comprise the amino acid sequence of SEQ ID NO: 388.

[1998] Also provided herein is a molecule that is a product of a thiol-bromoacetyl reaction between a structure as depicted in FIG. 11 and a thiol group of a cysteine residue of an anti-GIPR antibody. In some embodiments, the molecule is a product of a thiol-bromoacetyl reaction between a structure as depicted in FIG. 11 and a thiol group of a cysteine residue at position 275 of SEQ ID NO: 1571.

[1999] Also provided herein is a molecule prepared by condensing two structures as depicted in FIG. 11 with an anti-GIPR antibody comprising two heavy chains, each comprising the amino acid sequence of SEQ ID NO: 1571, and two light chains, each comprising the amino acid sequence of SEQ ID NO: 388, wherein each structure as depicted in FIG. 11 is covalently linked to the anti-GIPR antibody via a thiol-bromoacetyl reaction between its bromoacetylated N-terminus and a thiol group of a cysteine residue at position 275 of a heavy chain (one molecule per heavy chain).

[2000] Also provided herein is a molecule comprising the structure of FIG. 12, wherein the squiggly line represents a connection point between the structure of FIG. 12 and a sulfur atom of a cysteine residue of an anti-GIPR antibody.

[2001] In some embodiments, the molecule comprises the structure of FIG. 12, wherein the squiggly line represents a connection point between the structure of FIG. 12 and a sulfur atom of a cysteine residue at position 275 of SEQ ID NO: 1571.

[2002] In some embodiments, the molecule comprises:
[2003] a first structure of FIG. 12, wherein the squiggly line represents a connection point between the first structure of FIG. 12 and a sulfur atom of a cysteine residue at position 275 of a first heavy chain, wherein the first heavy chain comprises the amino acid sequence of SEQ ID NO: 1571;
[2004] a second structure of FIG. 12, wherein the squiggly line represents a connection point between the second structure of FIG. 12 and a sulfur atom of a cysteine residue at position 275 of a second heavy chain, wherein the second heavy chain comprises the amino acid sequence of SEQ ID NO: 1571; and
[2005] a first light chain and a second light chain, wherein the first light chain and the second light chain both comprise the amino acid sequence of SEQ ID NO: 388.

[2006] Also provided herein is a molecule that is a product of a thiol-bromoacetyl reaction between a structure as depicted in FIG. 13 and a thiol group of a cysteine residue of an anti-GIPR antibody. In some embodiments, the molecule is a product of a thiol-bromoacetyl reaction between a structure as depicted in FIG. 13 and a thiol group of a cysteine residue at position 275 of SEQ ID NO: 1571.

[2007] Also provided herein is a molecule prepared by condensing two structures as depicted in FIG. 13 with an anti-GIPR antibody comprising two heavy chains, each comprising the amino acid sequence of SEQ ID NO: 1571, and two light chains, each comprising the amino acid sequence of SEQ ID NO: 388, wherein each structure as depicted in FIG. 13 is covalently linked to the anti-GIPR antibody via a thiol-bromoacetyl reaction between its bromoacetylated N-terminus and a thiol group of a cysteine residue at position 275 of a heavy chain (one molecule per heavy chain).

[2008] Also provided herein is a molecule comprising the structure of FIG. 14, wherein the squiggly line represents a connection point between the structure of FIG. 14 and a sulfur atom of a cysteine residue of an anti-GIPR antibody.

[2009] In some embodiments, the molecule comprises the structure of FIG. 14, wherein the squiggly line represents a connection point between the structure of FIG. 14 and a sulfur atom of a cysteine residue at position 275 of SEQ ID NO: 1571.

[2010] In some embodiments, the molecule comprises:
[2011] a first structure of FIG. 14, wherein the squiggly line represents a connection point between the first structure of FIG. 14 and a sulfur atom of a cysteine residue at position 275 of a first heavy chain, wherein the first heavy chain comprises the amino acid sequence of SEQ ID NO: 1571;
[2012] a second structure of FIG. 14, wherein the squiggly line represents a connection point between the second structure of FIG. 14 and a sulfur atom of a cysteine residue at position 275 of a second heavy chain, wherein the second heavy chain comprises the amino acid sequence of SEQ ID NO: 1571; and
[2013] a first light chain and a second light chain, wherein the first light chain and the second light chain both comprise the amino acid sequence of SEQ ID NO: 388.

[2014] Also provided herein is a molecule that is a product of a thiol-bromoacetyl reaction between a structure as depicted in FIG. 15 and a thiol group of a cysteine residue of an anti-GIPR antibody. In some embodiments, the molecule is a product of a thiol-bromoacetyl reaction between a structure as depicted in FIG. 15 and a thiol group of a cysteine residue at position 275 of SEQ ID NO: 1571.

[2015] Also provided herein is a molecule prepared by condensing two structures as depicted in FIG. 15 with an anti-GIPR antibody comprising two heavy chains, each comprising the amino acid sequence of SEQ ID NO: 1571, and two light chains, each comprising the amino acid sequence of SEQ ID NO: 388, wherein each structure as depicted in FIG. 15 is covalently linked to the anti-GIPR antibody via a thiol-bromoacetyl reaction between its bromoacetylated N-terminus and a thiol group of a cysteine residue at position 275 of a heavy chain (one molecule per heavy chain).

[2016] Also provided herein is a molecule comprising the structure of FIG. 16, wherein the squiggly line represents a connection point between the structure of FIG. 16 and a sulfur atom of a cysteine residue of an anti-GIPR antibody.

[2017] In some embodiments, the molecule comprises the structure of FIG. 16, wherein the squiggly line represents a connection point between the structure of FIG. 16 and a sulfur atom of a cysteine residue at position 275 of SEQ ID NO: 1571.

[2018] In some embodiments, the molecule comprises:
[2019] a first structure of FIG. 16, wherein the squiggly line represents a connection point between the first structure of FIG. 16 and a sulfur atom of a cysteine residue at position 275 of a first heavy chain, wherein the first heavy chain comprises the amino acid sequence of SEQ ID NO: 1571;
[2020] a second structure of FIG. 16, wherein the squiggly line represents a connection point between the second structure of FIG. 16 and a sulfur atom of a cysteine residue at position 275 of a second heavy chain, wherein the second heavy chain comprises the amino acid sequence of SEQ ID NO: 1571; and
[2021] a first light chain and a second light chain, wherein the first light chain and the second light chain both comprise the amino acid sequence of SEQ ID NO: 388.

[2022] In some embodiments of the present disclosure, the structure as depicted in FIG. 10 is conjugated to an anti-GIPR antibody via a cysteine residue of the anti-GIPR antibody. Illustratively, provided herein is a molecule comprising a structure as depicted in FIG. 10 and an antibody that specifically binds to a glucose-dependent insulinotropic polypeptide receptor (“GIPR”) (e.g., an anti-GIPR antibody as described herein). In some embodiments, the structure as depicted in FIG. 10 is conjugated to a cysteine residue of the antibody. In some embodiments, the antibody comprises a light chain and a heavy chain, wherein the light chain comprises the amino acid sequence of SEQ ID NO: 388 and the heavy chain comprises the amino acid sequence of SEQ ID NO: 1571, and, in some embodiments, the structure as depicted in FIG. 10 is conjugated to a cysteine residue at position 275 of the heavy chain. Also provided herein is a molecule comprising a first structure as depicted in FIG. 10, a second structure as depicted in FIG. 10, and an antibody that specifically binds to a glucose-dependent insulinotropic polypeptide receptor (“GIPR”) (e.g., an anti-GIPR antibody as described herein). In some embodiments, the first and second structures as depicted in FIG. 10 are each conjugated to a cysteine residue of the antibody. In some embodiments, the antibody comprises a first light chain and a second light chain, wherein the first light chain and the second light chain each comprise the amino acid sequence of SEQ ID NO: 388, and a first heavy chain and a second heavy chain, wherein the first heavy chain and the second heavy chain each comprise the amino acid sequence of SEQ ID NO: 1571, and further wherein the first structure as depicted in FIG. 10 is conjugated to a cysteine residue at position 275 of the first heavy chain and the second structure as depicted in FIG. 10 is conjugated to a cysteine residue at position 275 of the second heavy chain.

[2023] In some embodiments of the present disclosure, the structure as depicted in FIG. 12 is conjugated to an anti-GIPR antibody via a cysteine residue of the anti-GIPR antibody. Illustratively, provided herein is a molecule comprising a structure as depicted in FIG. 12 and an antibody that specifically binds to a glucose-dependent insulinotropic polypeptide receptor (“GIPR”) (e.g., an anti-GIPR antibody as described herein). In some embodiments, the structure as depicted in FIG. 12 is conjugated to a cysteine residue of the antibody. In some embodiments, the antibody comprises a light chain and a heavy chain, wherein the light chain comprises the amino acid sequence of SEQ ID NO: 388 and the heavy chain comprises the amino acid sequence of SEQ ID NO: 1571, and, in some embodiments, the structure as depicted in FIG. 12 is conjugated to a cysteine residue at position 275 of the heavy chain. Also provided herein is a molecule comprising a first structure as depicted in FIG. 12, a second structure as depicted in FIG. 12, and an antibody that specifically binds to a glucose-dependent insulinotropic polypeptide receptor (“GIPR”) (e.g., an anti-GIPR antibody as described herein). In some embodiments, the first and second structures as depicted in FIG. 12 are each conjugated to a cysteine residue of the antibody. In some embodiments, the antibody comprises a first light chain and a second light chain, wherein the first light chain and the second light chain each comprise the amino acid sequence of SEQ ID NO: 388, and a first heavy chain and a second heavy chain, wherein the first heavy chain and the second heavy chain each comprise the amino acid sequence of SEQ ID NO: 1571, and further wherein the first structure as depicted in FIG. 12 is conjugated to a cysteine residue at position 275 of the first heavy chain and the second structure as depicted in FIG. 12 is conjugated to a cysteine residue at position 275 of the second heavy chain.

[2024] In some embodiments of the present disclosure, the structure as depicted in FIG. 14 is conjugated to an anti-GIPR antibody via a cysteine residue of the anti-GIPR antibody. Illustratively, provided herein is a molecule comprising a structure as depicted in FIG. 14 and an antibody that specifically binds to a glucose-dependent insulinotropic polypeptide receptor (“GIPR”) (e.g., an anti-GIPR antibody as described herein). In some embodiments, the structure as depicted in FIG. 14 is conjugated to a cysteine residue of the antibody. In some embodiments, the antibody comprises a light chain and a heavy chain, wherein the light chain comprises the amino acid sequence of SEQ ID NO: 388 and the heavy chain comprises the amino acid sequence of SEQ ID NO: 1571, and, in some embodiments, the structure as depicted in FIG. 14 is conjugated to a cysteine residue at position 275 of the heavy chain. Also provided herein is a molecule comprising a first structure as depicted in FIG. 14, a second structure as depicted in FIG. 14, and an antibody that specifically binds to a glucose-dependent insulinotropic polypeptide receptor (“GIPR”) (e.g., an anti-GIPR antibody as described herein). In some embodiments, the first and second structures as depicted in FIG. 14 are each conjugated to a cysteine residue of the antibody. In some embodiments, the antibody comprises a first light chain and a second light chain, wherein the first light chain and the second light chain each comprise the amino acid sequence of SEQ ID NO: 388, and a first heavy chain and a second heavy chain, wherein the first heavy chain and the second heavy chain each comprise the amino acid sequence of SEQ ID NO: 1571, and further wherein the first structure as depicted in FIG. 14 is conjugated to a cysteine residue at position 275 of the first heavy chain and the second structure as depicted in FIG. 14 is conjugated to a cysteine residue at position 275 of the second heavy chain.

[2025] In some embodiments of the present disclosure, the structure as depicted in FIG. 16 is conjugated to an anti-GIPR antibody via a cysteine residue of the anti-GIPR antibody. Illustratively, provided herein is a molecule comprising a structure as depicted in FIG. 16 and an antibody that specifically binds to a glucose-dependent insulinotropic polypeptide receptor (“GIPR”) (e.g., an anti-GIPR antibody as described herein). In some embodiments, the structure as depicted in FIG. 16 is conjugated to a cysteine residue of the antibody. In some embodiments, the antibody comprises a light chain and a heavy chain, wherein the light chain comprises the amino acid sequence of SEQ ID NO: 388 and the heavy chain comprises the amino acid sequence of SEQ ID NO: 1571, and, in some embodiments, the structure as depicted in FIG. 16 is conjugated to a cysteine residue at position 275 of the heavy chain. Also provided herein is a molecule comprising a first structure as depicted in FIG. 16, a second structure as depicted in FIG. 16, and an antibody that specifically binds to a glucose-dependent insulinotropic polypeptide receptor (“GIPR”) (e.g., an anti-GIPR antibody as described herein). In some embodiments, the first and second structures as depicted in FIG. 16 are each conjugated to a cysteine residue of the antibody. In some embodiments, the antibody comprises a first light chain and a second light chain, wherein the first light chain and the second light chain each comprise the amino acid sequence of SEQ ID NO: 388, and a first heavy chain and a second heavy chain, wherein the first heavy chain and the second heavy chain each comprise the amino acid sequence of SEQ ID NO: 1571, and further wherein the first structure as depicted in FIG. 16 is conjugated to a cysteine residue at position 275 of the first heavy chain and the second structure as depicted in FIG. 16 is conjugated to a cysteine residue at position 275 of the second heavy chain.

[2026] In some embodiments, the anti-GIPR×GCGR agonist conjugates described herein have a hGCGR EC50 of less than or equal to 1 nM.

[2027] In some embodiments, the anti-GIPR×GCGR agonist conjugates described herein have a hGCGR EC₅₀ of less than or equal to 500 pM (e.g., less than or equal to 475 pM, less than or equal to 450 pM, less than or equal to 425 pM, less than or equal to 400 pM, less than or equal to 375 pM, less than or equal to 350 pM, less than or equal to 325 pM, less than or equal to 300 pM, less than or equal to 275 pM, less than or equal to 250 pM, less than or equal to 225 pM, less than or equal to 200 pM, less than or equal to 175 pM, less than or equal to 150 pM, less than or equal to 125 pM, less than or equal to 100 pM). In some embodiments, the hGCGR EC₅₀ is measured in a functional assay described in “EXAMPLE 1: GCG Receptor Agonist Activity.”

[2028] In some embodiments, the anti-GIPR×GCGR agonist conjugates described herein have a hGCGR EC₅₀ of 50 pM, 55 pM, 60 pM, 65 pM, 70 pM, 75 pM, 80 pM, 85 pM, 90 pM, 95 pM, 100 pM, 105 pM, 110 pM, 115 pM, 120 pM, 125 pM, 130 pM, 135 pM, 140 pM, 145 pM, 150 pM, 155 pM, 200 pM, 205 pM, 210 pM, 215 pM, 220 pM, 225 pM, 230 pM, 235 pM, 240 pM, 245 pM, 250 pM, 255 pM, 260 pM, 265 pM, 270 pM, 275 pM, 280 pM, 285 pM, 290 pM, 295 pM, 300 pM, 305 pM, 310 pM, 315 pM, 320 pM, 325 pM, 330 pM, 335 pM, 340 pM, 345 pM, 350 pM, 355 pM, 360 pM, 365 pM, 370 pM, 375 pM, 380 pM, 385 pM, 390 pM, 395 pM, 400 pM, 405 pM, 410 pM, 415 pM, 420 pM, 425 pM, 430 pM, 435 pM, 440 pM, 445 pM, 450 pM, 455 pM, 460 pM, 465 pM, 470 pM, 475 pM, 480 pM, 485 pM, 490 pM, 495 pM, or 500 pM. In some embodiments, the hGCGR EC₅₀ is measured in a functional assay described in “EXAMPLE 1: GCG Receptor Agonist Activity.”

[2029] In some embodiments, the conjugate has a human glucagon-like peptide-1 receptor (“hGLP-1R”) EC₅₀:hGCGR EC₅₀ ratio of at least 30:1. In some embodiments, the conjugate has a hGLP-1R EC₅₀:hGCGR EC₅₀ ratio of at least 40:1. In some embodiments, the conjugate has a hGLP-1R EC₅₀:hGCGR EC₅₀ ratio of at least 50:1. In some embodiments, the conjugate has a hGLP-1R EC₅₀:hGCGR EC₅₀ ratio of at least 60:1. In some embodiments, the conjugate has a hGLP-1R EC₅₀:hGCGR EC₅₀ ratio of at least 70:1. In some embodiments, the conjugate has a hGLP-1R EC₅₀:hGCGR EC₅₀ ratio of at least 80:1. In some embodiments, the conjugate has a hGLP-1R EC₅₀:hGCGR EC₅₀ ratio of at least 90:1. In some embodiments, the conjugate has a hGLP-1R EC₅₀:hGCGR EC₅₀ ratio of at least 100:1. In some embodiments, the conjugate has a hGLP-1R EC₅₀:hGCGR EC₅₀ ratio of at least 150:1. In some embodiments, the conjugate has a hGLP-1R EC₅₀:hGCGR EC₅₀ ratio of at least 200:1. In some embodiments, the conjugate has a hGLP-1R EC₅₀:hGCGR EC₅₀ ratio of at least 250:1. In some embodiments, the conjugate has a hGLP-1R EC₅₀:hGCGR EC₅₀ ratio of at least 300:1.

[2030] In some embodiments, the conjugate has a hGLP-1R EC₅₀:hGCGR EC₅₀ ratio of at least 350:1. In some embodiments, the conjugate has a hGLP-1R EC₅₀:hGCGR EC₅₀ ratio of at least 400:1. In some embodiments, the conjugate has a hGLP-1R EC₅₀:hGCGR EC₅₀ ratio of at least 450:1. In some embodiments, the conjugate has a hGLP-1R EC₅₀:hGCGR EC₅₀ ratio of at least 500:1. In some embodiments, the conjugate has a hGLP-1R EC₅₀:hGCGR EC₅₀ ratio of at least 550:1. In some embodiments, the conjugate has a hGLP-1R EC₅₀:hGCGR EC₅₀ ratio of at least 650:1. In some embodiments, the conjugate has a hGLP-1R EC₅₀:hGCGR EC₅₀ ratio of at least 700:1. In some embodiments, the conjugate has a hGLP-1R EC₅₀:hGCGR EC₅₀ ratio of at least 750:1. In some embodiments, the conjugate has a hGLP-1R EC₅₀:hGCGR EC₅₀ ratio of at least 800:1. In some embodiments, the conjugate has a hGLP-1R EC₅₀:hGCGR EC₅₀ ratio of at least 850:1. In some embodiments, the conjugate has a hGLP-1R EC₅₀:hGCGR EC₅₀ ratio of at least 900:1. In some embodiments, the conjugate has a hGLP-1R EC₅₀:hGCGR EC₅₀ ratio of at least 950:1. In some embodiments, the conjugate has a hGLP-1R EC₅₀:hGCGR EC₅₀ ratio of at least 1000:1. In some embodiments, the hGCGR EC₅₀ is measured in a functional assay described in “EXAMPLE 1: GCG Receptor Agonist Activity” and the hGLP-1R EC₅₀ is measured in a functional assay described in “EXAMPLE 2: GLP-1 Receptor Agonist Activity.”

[2031] In some embodiments, the conjugate has a hGLP-1R EC₅₀:hGCGR EC₅₀ ratio of 30:1, 40:1, 45:1, 50:1, 55:1, 60:1, 65:1, 70:1, 75:1, 80:1, 85:1, 90:1, 95:1, 100:1, 125:1, 150:1, 175:1, 200:1, 225:1, 250:1, 275:1, 300:1, 325:1, 350:1, 375:1, 400:1, 425:1, 450:1, 475:1, 500:1, 525:1, 550:1, 575:1, 600:1, 625:1, 650:1, 675:1, 700:1, 725:1, 750:1, 775:1, 800:1, 825:1, 850:1, 875:1, 900:1, 925:1, 950:1, 975:1, or 1000:1. In some embodiments, the hGCGR EC₅₀ is measured in a functional assay described in “EXAMPLE 1: GCG Receptor Agonist Activity” and the hGLP-1R EC₅₀ is measured in a functional assay described in “EXAMPLE 2: GLP-1 Receptor Agonist Activity.”

[2032] In some embodiments, the anti-GIPR×GCGR agonist conjugates described herein have a hGIPR IC₅₀ of less than or equal to 500 nM (e.g., less than or equal to 475 nM, less than or equal to 450 nM, less than or equal to 425 nM, less than or equal to 400 nM, less than or equal to 375 nM, less than or equal to 350 nM, less than or equal to 325 nM, less than or equal to 300 nM, less than or equal to 275 nM, less than or equal to 250 nM, less than or equal to 225 nM, less than or equal to 200 nM, less than or equal to 175 nM, less than or equal to 150 nM, less than or equal to 125 nM, less than or equal to 100 nM). In some embodiments, the hGIPR IC₅₀ is measured in a functional assay described in “EXAMPLE 3: GIPR Antagonist Activity.”

[2033] In some embodiments, the anti-GIPR×GCGR agonist conjugates described herein have a hGIPR IC₅₀ of 5 nM, 10 nM, 15 nM, 20 nM, 25 nM, 30 nM, 35 nM, 40 nM, 45 nM, 50 nM, 55 nM, 60 nM, 65 nM, 70 nM, 75 nM, 80 nM, 85 nM, 90 nM, 95 nM, 100 nM, 105 nM, 110 nM, 115 nM, 120 nM, 125 nM, 130 nM, 135 nM, 140 nM, 145 nM, 150 nM, 155 nM, 200 nM, 205 nM, 210 nM, 215 nM, 220 nM, 225 nM, 230 nM, 235 nM, 240 nM, 245 nM, 250 nM, 255 nM, 260 nM, 265 nM, 270 nM, 275 nM, 280 nM, 285 nM, 290 nM, 295 nM, 300 nM, 305 nM, 310 nM, 315 nM, 320 nM, 325 nM, 330 nM, 335 nM, 340 nM, 345 nM, 350 nM, 355 nM, 360 nM, 365 nM, 370 nM, 375 nM, 380 nM, 385 nM, 390 nM, 395 nM, 400 nM, 405 nM, 410 nM, 415 nM, 420 nM, 425 nM, 430 nM, 435 nM, 440 nM, 445 nM, 450 nM, 455 nM, 460 nM, 465 nM, 470 nM, 475 nM, 480 nM, 485 nM, 490 nM, 495 nM, or 500 nM. In some embodiments, the hGIPR IC₅₀ is measured in a functional assay described in “EXAMPLE 3: GIPR Antagonist Activity.”

### Linker Moieties and Conjugation Methods

[2034] Linker moieties may be used in certain conjugates disclosed herein to link a glucagon or glucagon analog to another molecule, such as a half-life extending domain (e.g., an Fc-containing polypeptide) or an antigen-binding protein (e.g., an anti-GIPR antibody). When present, the chemical structure of the linker moiety is not critical, since it serves primarily as a spacer to position, join, connect, or optimize presentation or position of one functional moiety in relation to one or more other functional moieties. In some embodiments, a linker moiety, if present, can be made up of amino acids linked together by peptide bonds and referred to as a peptidyl linker or a linker polypeptide. In some embodiments, a linker moiety, if present, can be independently the same or different from any other linker moiety, or linker moieties, that may be present in a disclosed molecule. In some embodiments, the linker moiety can be chemically derivatized (such as, e.g., at the N-terminus or the C-terminus), e.g., when a functional group was installed to facilitate covalent joining or conjugation of the linker moiety to another molecule.

[2035] As stated above, in some embodiments, the linker moiety, if present, can be “peptidyl” in nature (i.e., made up of amino acids linked together by peptide bonds) and made up in length, preferably, of from 1 up to about 40 amino acid residues, more preferably, of from 1 up to about 20 amino acid residues, and most preferably of from 1 to about 10 amino acid residues. Preferably, but not necessarily, the amino acid residues in the linker are from among the twenty canonical amino acids, more preferably, cysteine, glycine, alanine, proline, asparagine, glutamine, and/or serine. Even more preferably, a peptidyl linker can be made up of a majority of amino acids that are sterically unhindered, such as glycine, serine, and alanine linked by a peptide bond. In some embodiments, if present, a peptidyl linker is selected that avoids rapid proteolytic turnover in circulation in vivo.

[2036] Non-limiting examples of linker moieties that can be used in molecules of the present disclosure include linker polypeptides comprising the amino acid sequences presented in Table 18A or Table 18B. In Table 18A, Pra is shorthand for L-propargylglycine and Hyp is shorthand for 4-hydroxyproline. In some embodiments, the linker polypeptide comprises an amino acid sequence selected from the amino acid sequences of Table 18A (e.g., any of SEQ ID NOs: 1628-1630; SEQ ID NO: 1628, SEQ TD NO: 1629, SEQ TD NO: 1630), wherein the linker polypeptide is derivatized to facilitate conjugation. In some embodiments, the linker polypeptide comprises an amino acid sequence selected from the amino acid sequences of Table 18A (e.g., any of SEQ ID NOs: 1628-1630; SEQ ID NO: 1628, SEQ TD NO: 1629, SEQ ID NO: 1630), wherein the N-terminus is derivatized to facilitate conjugation. In some embodiments, the linker polypeptide comprises an amino acid sequence selected from the amino acid sequences of Table 18A (e.g., any of SEQ TD NOs: 1628-1630; SEQ ID NO: 1628, SEQ TD NO: 1629, SEQ ID NO: 1630), wherein the N-terminus is acetylated.

[2037] In some embodiments, the linker polypeptide comprises an amino acid sequence selected from the amino acid sequences of Table 18B3, wherein the linker polypeptide is derivatized to facilitate conjugation. In some embodiments, the linker polypeptide comprises an amino acid sequence selected from the amino acid sequences of Table 18B3, wherein the N-terminus is derivatized to facilitate conjugation. In some embodiments, the linker polypeptide comprises an amino acid sequence selected from the amino acid sequences of Table 181B, wherein the N-terminus is acetylated.

TABLE 18A
Example Linker Sequences

| | SEQ |
|---|---|
| Linker Sequence | ID NO: |
| GGGGS GGGGS PAPAP APAPA PASGG | 1628 |
| GSPAP APAPA PAPAP APAPA PASGG | 1629 |
| GGGGS GGGGS GGGGS GGGGS GGGGS | 1630 |
| GSPAP APAPA PAPAP APAPA PASG | 1631 |
| GSPAP APAPA PAPAG GGGSG GGGS | 1632 |
| GSPAP APAPA PASGG GG | 1633 |
| GSPAP APAPA PASGG | 1634 |
| GSPAP APAPA SGG | 1635 |
| GGGGS GGGGS GGGGS GGGGS | 1636 |
| GSGGG GSGGG GSGGG GSGGG G | 1637 |
| GGGGS GGGGS GGGGS | 1638 |
| GSGGG GSGGG GSGGG G | 1639 |
| GAKAA AEKAA AEKAA AEKAA AEA | 1640 |
| GAKAQ ADAKA QADAK AQADA KAQAD SGG | 1641 |
| GS[Hyp][Hyp][Hyp][Hyp][Hyp][Hyp][Hyp] | 1642 |
| [Hyp][Hyp][Hyp][Hyp][Hyp]S GG | |
| G[NPeg24] | 1643 |
| G[NPeg27] | 1644 |
| GG[NPeg24] | 1645 |
| GG[NPeg6][NPeg11] | 1646 |
| GINPeg11]SPA PAPAP APAPA SGG | 1647 |
| GGGSG GGS | 1648 |
| GGGSG GGSGG GS | 1649 |
| GGGSG GGSGG GSGGG S | 1650 |
| GGGSG GGSGG GSGGG SGGGS | 1651 |
| GGGSG GGSGG GSGGG SGGGS GGGS | 1652 |
| GGGGS GGGGS | 1653 |
| GGGGS GGGGS GGGGS GGGGS GGGGS GGGGS | 1654 |
| GGG | 1655 |
| GGGG | 1656 |
| GGGGG | 1657 |
| GGGGG GG | 1658 |
| GGGGG K | 1659 |
| GGGGG KR | 1660 |
| GGGKG GGG | 1661 |
| GGGNG SGG | 1662 |
| GGGCG GGG | 1663 |
| GPNGG | 1664 |
| GGGGS | 1665 |
| GGEGG G | 1666 |
| GGEEE GGG | 1667 |
| GEEEG | 1668 |
| GEEE | 1669 |
| GGDGG G | 1670 |
| GGDDD GG | 1671 |
| GDDDG | 1672 |
| GDDD | 1673 |
| GGGGS DDSDE GSDGE DGGGG S | 1674 |
| WEWEW | 1675 |
| FEFEF | 1676 |
| EEEWW W | 1677 |
| EEEFF F | 1678 |
| WWEEE WW | 1679 |
| FFEEE FF | 1680 |
| GSGSA TGGSG STASS GSGSA TH | 1681 |
| HGSGS ATGGS GSTAS SGSGS AT | 1682 |
| AEAAA KEAAA KEAAA KAGG | 1683 |
| GSPAP APAPA PAPAP APAPA PASGG [Pra] | 1739 |
| [NPeg27]K | 1740 |
| A PAPAP APAPA PAGGG GSGGG GSK | 1741 |
| A PAPAP APAPA PAPAP APAPA K | 1742 |
| G GGGSG GGGSG GGGSG GGGSK | 1743 |
| G GGGSG GGGSG GGGSK | 1744 |
| G GSAPA PAPAP APAPA PAPAP APSGK | 1745 |
| GG GGSGG GGSGG GGSK | 1746 |

TABLE 18B
Additional Example Linker Sequences

| Linker Sequence | SEQ ID NO: |
|---|---|
| GGGGSGGGGSAPAPAPAPAPAPAK | 1841 |
| GGGGSGGGGSAPAPAPAPAPGGSK | 1842 |
| GPSGGGGSGGGGSAPAPAPAPAPAPGGSK | 1843 |
| GPSGGSAPAPAPAPAPAPGGGGSGGGGSK | 1844 |
| GPSSGAPPPSAPAPAPAPAPAPAPAPAPAPAK | 1845 |
| GPSSGAPPPSGGGGSGGGGSGGGGSK | 1846 |
| GSAPAPAPAPAPAPAPAPAPAPGGSK | 1847 |
| PSSGAPPPSAPAPAPAPAPAPAPAPAPAPAK | 1848 |
| PSSGAPPPSGGGGSGGGGSGGGGSK | 1849 |
| GQPAP APAPA PAPAP APAPA PAQGG | 1850 |
| GGGGQ GGGGQ PAPAP APAPA PAQGG | 1851 |
| G PSGSA PAPAP APAPA PAPAP APAPG GSK | 1852 |

[2038] In some embodiments, one or more amino acids of a linker polypeptide may be glycosylated.

[2039] In some embodiments, a linker polypeptide comprises a sialylation site. In some embodiments, the linker polypeptide comprises X₁X₂NX₄X₅G (SEQ ID NO: 1684), wherein X₁, X₂, X₄ and X₅ are each independently any amino acid residue.

[2040] In some embodiments, a linker polypeptide comprises a phosphorylation site. In some embodiments, the linker polypeptide comprises X₁X₂YX₄X₅G (SEQ ID NO: 1685), wherein X₁, X₂, X₄, and X₅ are each independently any amino acid residue. In some embodiments, the linker polypeptide comprises X₁X₂SX₄X₅G (SEQ ID NO: 1686), wherein X₁, X₂, X₄, and X₅ are each independently any amino acid residue. In some embodiments, the linker polypeptide comprises X₁X₂TX₄X₅G (SEQ ID NO: 1687), wherein X₁, X₂, X₄, and X₅ are each independently any amino acid residue.

[2041] Specific polypeptide linkers are provided for the purposes of illustration only. Peptidyl linkers within the scope of this disclosure may be much longer and may include other residues than those specifically recited herein. For example, a linker polypeptide can comprise, e.g., a cysteine, another thiol, or nucleophile for conjugation with a half-life extending moiety, such as, e.g., a Fc-containing polypeptide. In other embodiments, a linker polypeptide can comprise a cysteine or homocysteine residue, or other 2-amino-ethanethiol or 3-amino-propanethiol moiety for conjugation to a maleimide, iodoacetaamide, or thioester functional group. Moreover, in alternative embodiments of example embodiments of the disclosure that recite a linker polypeptide comprising the amino acid sequence of any one of SEQ ID NOs: 1628-1683, a linker polypeptide described in this section (e.g., a linker polypeptide comprising the amino acid sequence of any one of SEQ ID NOs: 1684-1687 or SEQ ID NOs: 1739-1746) can be used instead.

[2042] Alternatively, a non-peptidyl linker moiety can be used in certain molecules described herein. For example, in some embodiments, alkyl linkers such as —NH—(CH₂)ₛ—C(O)—, wherein s=2-20, can be used. These alkyl linkers may further be substituted by any non-sterically hindering group. One non-limiting example class of non-peptidyl linkers is polyethylene glycol (PEG) linkers, such as, e.g.,

[chemical structure]

wherein n is such that the linker has a molecular weight of about 100 Daltons (Da) to about 5000 Da, preferably about 100 Da to about 500 Da.

[2043] In some embodiments, the non-peptidyl linker comprises a rigid polyheterocyclic core of controlled length. Such linkers may be chemically differentiated on either end to accommodate orthogonal coupling chemistries (i.e., azide “click”, amide coupling, thioether formation by alkylation with maleimide or haloacetamide, oxime formation, reductive amination, etc.).

[2044] Non-peptidyl linkers can be synthesized by conventional organic chemistry reactions.

[2045] The above is merely illustrative and not an exhaustive treatment of the kinds of non-peptidyl linkers that can optionally be employed in accordance with the present disclosure.

[2046] In some embodiments, a chemistry for chemoselective conjugation can be used to conjugate a polypeptide to a linker moiety. Such chemistries include, but are not limited to, copper(I)-catalyzed azide-alkyne [3+2] dipolar cycloadditions, Staudinger ligation, other acyl transfers processes, oximations, hydrazone bonding formation, and other suitable organic chemistry reactions such as cross-couplings using water-soluble palladium catalysts. (E.g., Bong et al., Chemoselective Pd(0)-catalyzed peptide coupling in water, Organic Letters 3(16):2509-11 (2001); Dibowski et al., Bioconjugation of peptides by palladium-catalyzed C—C cross-coupling in water, Angew. Chem. Int. Ed. 37(4):476-78 (1998); DeVasher et al., Aqueous-phase, palladium-catalyzed cross-coupling of aryl bromides under mild conditions, using water-soluble, sterically demanding alkylphosphines, J. Org. Chem. 69:7919-27 (2004); Shaugnessy et al., J. Org. Chem, 2003, 68, 6767-6774; Prescher, JA and Bertozzi C R, Chemistry in living system, Nature Chemical Biology 1(1); 13-21 (2005)).

[2047] Glucagon receptor agonist amino acid residues that can provide a primary amine moiety for conjugation include residues of lysine, homolysine, ornithine, α, β-diaminopropionic acid (Dap), α, β-diaminopropionoic acid (Dpr), and α, γ-diaminobutyric acid (Dab), aminobutyric acid (Abu), and α-amino-isobutyric acid (Aib). The polypeptide N-terminus also provides a useful α-amino group for conjugation as does an amidated polypeptide C-terminus.

[2048] In some embodiments, an anti-GIPR antigen-binding protein can be conjugated to a linker moiety through the side chain of an amino acid residue at an internal conjugation site, such as, e.g., a cysteinyl residue. In some embodiments, the amino acid residue, e.g., a cysteinyl residue, at the internal conjugation site that is selected can be one that occupies the same amino acid residue position in a native Fc domain sequence, or the amino acid residue can be engineered into the Fc domain sequence by substitution or insertion.

[2049] In some embodiments, an antibody conjugate of the present disclosure can be prepared using a conjugation method described in WO 2019/028382, which is incorporated by reference herein.

### Pharmaceutical Compositions

[2050] While it may be possible to administer a polypeptide or molecule disclosed herein alone in the uses described, the polypeptide or molecule will normally be administered as an active ingredient in a pharmaceutical composition. Thus, further provided herein is a pharmaceutical composition comprising a polypeptide or a molecule disclosed herein and a pharmaceutically acceptable excipient. Non-limiting examples of pharmaceutically acceptable excipients include calcium carbonate, calcium phosphate, sugars (e.g., lactose, glucose, or sucrose), starches, cellulose derivatives, gelatin, vegetable oils, polyethylene glycols, and physiologically compatible solvents. See, e.g., Remington: The Science and Practice of Pharmacy, Volume I and Volume II, twenty-second edition, edited by Loyd V. Allen Jr., Philadelphia, PA, Pharmaceutical Press, 2012; Pharmaceutical Dosage Forms (Vol. 1-3), Liberman et al., Eds., Marcel Dekker, New York, NY, 1992; Handbook of Pharmaceutical Excipients (3rd Ed.), edited by Arthur H. Kibbe, American Pharmaceutical Association, Washington, 2000; Pharmaceutical Formulation: The Science and Technology of Dosage Forms (Drug Discovery), first edition, edited by GD Tovey, Royal Society of Chemistry, 2018.

[2051] In some cases, the pharmaceutical composition described herein comprises a therapeutically effective amount of a polypeptide or molecule disclosed herein. In some embodiments, the pharmaceutical composition is made in the form of a dosage unit containing a particular amount of the active ingredient.

[2052] The polypeptides and molecules disclosed herein may be administered by any suitable route in the form of a pharmaceutical composition adapted to such a route and in a dose effective for the treatment intended. The polypeptides, molecules, and compositions presented herein may, for example, be administered orally, mucosally, topically, transdermally, rectally, pulmonarily, parentally, intranasally, intravascularly, intravenously, intraarterial, intraperitoneally, intrathecally, subcutaneously, sublingually, intramuscularly, intrasternally, vaginally or by infusion techniques, in dosage unit formulations containing conventional pharmaceutically acceptable excipients. For example, in some embodiments, a pharmaceutical composition disclosed herein may be provided for peripheral administration, such as parenteral (e.g., subcutaneous, intravenous, intramuscular), continuous infusion (e.g., intravenous drip, intravenous bolus, intravenous infusion), topical, nasal, or oral administration.

[2053] Pharmaceutical compositions disclosed herein may be sterilized by conventional sterilization techniques or may be sterile-filtered. In some embodiments, such compositions comprise sterile water. In some embodiments, such compositions can contain pharmaceutically acceptable auxiliary substances as required to approximate physiological conditions, such as, e.g., pH buffering agents (e.g., an acetic acid buffer).

[2054] In some embodiments, the pharmaceutical composition comprises sterile water and sodium chloride. In some embodiments, the pharmaceutical composition comprises sterile water and dextrose. In some embodiments, the pharmaceutical composition comprises sterile water, sodium chloride, and dextrose.

[2055] In some embodiments, the pharmaceutical composition comprises an aqueous carrier. In some embodiments, the aqueous carrier is an isotonic buffer solution at a pH in the range of 3.0 to 8.0 (such as, e.g., in the range of 3.0 to 5.0).

[2056] In some embodiments, the pharmaceutical composition is a parenteral composition. In some embodiments, the pharmaceutical composition is a parenteral composition for injection. In some embodiments, the pharmaceutical composition is a parenteral composition for infusion.

[2057] In some embodiments, a form of repository or “depot” slow release preparation may be used so that therapeutically effective amounts of the preparation are delivered into the bloodstream over many hours or days following subcutaneous injection, transdermal injection, or other delivery method. The desired isotonicity may be accomplished using sodium chloride or other pharmaceutically acceptable excipients, such as, e.g., dextrose, boric acid, sodium tartrate, propylene glycol, polyols (such as, e.g., mannitol and sorbitol), or other inorganic or organic solutes.

### Treatment Methods

[2058] The present disclosure provides polypeptides that agonize a glucagon receptor (“GCGR”) and molecules comprising such polypeptides and a half-life extending domain (e.g., an Fc-containing polypeptide), including molecules comprising a polypeptide that agonizes a GCGR and an antibody that specifically binds to a glucose-dependent insulinotropic polypeptide receptor (“GIPR”). Without intending to be bound by any particular theory, the polypeptides and molecules of the disclosure can, in some cases, increase energy expenditure and improve circulating insulin and glucose concentrations, leading to reduced body weight, including reduced fat mass. Besides being useful for human treatment, the polypeptides and molecules provided herein may be useful for veterinary treatment of companion animals, exotic animals, and farm animals, including mammals, rodents, and the like. For example, animals including horses, dogs, and cats may be treated with polypeptides, molecules, and pharmaceutical compositions provided herein.

[2059] The polypeptides, molecules, and pharmaceutical compositions disclosed herein may be administered to a subject in a dose effective for the treatment intended and through any suitable routable, such as, e.g., by intravenous (IV) injection, intraperitoneal (IP) injection, subcutaneous injection, intramuscular injection, or orally in the form of a tablet or liquid formation.

[2060] In some embodiments, as disclosed elsewhere herein, a method of treating a patient is provided. In some embodiments, the method comprises administering a therapeutic amount of a polypeptide or molecule disclosed herein to a patient. In some embodiments, the patient is overweight or obese. In some embodiments, the subject has a body mass index (BMI) of at least 25.0 kg/m² (e.g., in the range of 25.0 kg/m² to 29.9 kg/m², inclusive of the endpoints; in the range of 30.0 kg/m² to 40.0 kg/m², inclusive of the endpoints; at least 30.0 kg/m²).

[2061] Another aspect of the disclosure provides a polypeptide or molecule disclosed herein for use in therapy. In some cases, the use is in weight management. In some cases, the use is in treating obesity. In some cases, the polypeptide or molecule may be used in acute therapy. In other cases, the polypeptide or molecule may be used in chronic therapy. Yet another aspect of the disclosure provides a use of a polypeptide or molecule disclosed herein in the manufacture of a medicament. In some cases, the medicament is for use in weight management. In some cases, the medicament is for use in treating obesity.

[2062] Still another aspect of the disclosure provides a method of treating obesity in a subject in need thereof, the method comprising administering a polypeptide, molecule, or pharmaceutical composition disclosed herein to the subject.

[2063] In some embodiments, the administration lowers blood glucose, insulin, triglyceride, or cholesterol levels; reduces body weight; or improves glucose tolerance, energy expenditure, or insulin sensitivity. In some embodiments, the administration lowers blood glucose, insulin, triglyceride, or cholesterol levels. In some embodiments, the administration lowers blood glucose levels. In some embodiments, the administration lowers insulin levels. In some embodiments, the administration lowers triglyceride levels. In some embodiments, the administration lowers cholesterol levels. In some embodiments, the administration reduces body weight. In some embodiments, the administration improves glucose tolerance, energy expenditure, or insulin sensitivity. In some embodiments, the administration improves glucose tolerance. In some embodiments, the administration improves energy expenditure. In some embodiments, the administration improves insulin sensitivity.

[2064] In some embodiments, prior to the administering, the subject has received prior treatment with a GLP-1 agonist (e.g., semaglutide). In other embodiments, prior to the administering, the subject has not received prior treatment with a GLP-1 agonist (e.g., semaglutide).

[2065] In some embodiments, the subject also receives a GLP-1 agonist treatment (e.g., semaglutide) during the administration. In other embodiments, the subject does not receive a GLP-1 agonist treatment (e.g., semaglutide) during the administration.

[2066] In some embodiments, prior to the administering, the subject has received prior treatment with a GLP-1 agonist (e.g., semaglutide), and the subject also receives a GLP-1 agonist treatment (e.g., semaglutide) during the administration.

[2067] In some embodiments, prior to the administering, the subject has not received prior treatment with a GLP-1 agonist (e.g., semaglutide), but the subject also receives a GLP-1 agonist treatment (e.g., semaglutide) during the administration.

[2068] In some embodiments, prior to the administering, the subject has received prior treatment with a GLP-1 agonist (e.g., semaglutide), but the subject does not receive a GLP-1 agonist treatment (e.g., semaglutide) during the administration.

[2069] In some embodiments, prior to the administering, the subject has not received prior treatment with a GLP-1 agonist (e.g., semaglutide), and the subject does not receive a GLP-1 agonist treatment (e.g., semaglutide) during the administration.

[2070] In some embodiments, prior to the administering, the subject is experiencing a weight-loss plateau. In some embodiments, prior to the administering, the subject is experiencing a weight-loss plateau while receiving treatment with a GLP-1 agonist (e.g., semaglutide).

[2071] In some embodiments, prior to the administering, the subject is experiencing a weight-loss plateau while receiving treatment with a GLP-1 agonist (e.g., semaglutide), and the subject also receives a GLP-1 agonist treatment (e.g., semaglutide) during the administration.

[2072] In some embodiments, prior to the administering, the subject is experiencing a weight-loss plateau while receiving treatment with a GLP-1 agonist (e.g., semaglutide), and the subject does not receive a GLP-1 agonist treatment (e.g., semaglutide) during the administration.

[2073] In some embodiments, prior to the administering, the subject has experienced a change in body weight of less than or equal to 2.5% (e.g., ≤2.4%, ≤2.3%, ≤2.2%, ≤2.1%, ≤2.0%, ≤1.9%, ≤1.8%, ≤1.7%, ≤1.6%, ≤1.5%, ≤1.4%, ≤1.3%, ≤1.2%, ≤1.1%, ≤1.0%, ≤0.9%, ≤0.8%, ≤0.7%, ≤0.6%, ≤0.5%, 0.4% 0.3% 0.2%, ≤0.1%; 2.4%, 2.3%, 2.2%, 2.1%, 2.0%, 1.9%, 1.8%, 1.7%, 1.6%, 1.5%, 1.4%, 1.3%, 1.2%, 1.1%, 1.0%, 0.9%, 0.8%, 0.7%, 0.6%, 0.5%, 0.4%, 0.3%, 0.2%, 0.1%, 0%) relative to a baseline in the 30-days preceding the administration. In some embodiments, the baseline is the subject's body weight 30-days prior to the administration. In some embodiments, the baseline is the subject's body weight prior to a first dose of a GLP-1 agonist (semaglutide).

[2074] In some embodiments, prior to the administering, the subject has experienced a change in body weight of less than or equal to 2.5% (e.g., ≤2.4%, ≤2.3%, ≤2.2%, ≤2.1%, ≤2.0%, ≤1.9%, ≤1.8%, ≤1.7%, ≤1.6%, ≤1.5%, ≤1.4%, ≤1.3%, ≤1.2%, ≤1.1%, ≤1.0%, ≤0.9%, ≤0.8%, ≤0.7%, ≤0.6%, ≤0.5% 0.4%, ≤0.3%, ≤0.2%, ≤0.1%; 2.4%, 2.3%, 2.2%, 2.1%, 2.0%, 1.9%, 1.8%, 1.7%, 1.6%, 1.5%, 1.4%, 1.3%, 1.2%, 1.1%, 1.0%, 0.9%, 0.8%, 0.7%, 0.6%, 0.5%, 0.4%, 0.3%, 0.2%, 0.1%, 0%) relative to a baseline in the 30-days preceding the administration while receiving treatment with a GLP-1 agonist (e.g., semaglutide). In some embodiments, the baseline is the subject's body weight 30-days prior to the administration. In some embodiments, the baseline is the subject's body weight prior to a first dose of a GLP-1 agonist.

[2075] In some embodiments, prior to the administering, the subject has experienced a change in body weight of less than or equal to 2.5% (e.g., ≤2.4%, ≤2.3%, ≤2.2%, ≤2.1%, ≤2.0%, ≤1.9%, ≤1.8%, ≤1.7%, ≤1.6%, ≤1.5%, ≤1.4%, ≤1.3%, ≤1.2%, ≤1.1%, ≤1.0%, ≤0.9%, ≤0.8%, ≤0.7%, ≤0.6%, ≤0.5%, ≤0.4%, ≤0.3%, ≤0.2%, ≤0.1%; 2.4%, 2.3%, 2.2%, 2.1%, 2.0%, 1.9%, 1.8%, 1.7%, 1.6%, 1.5%, 1.4%, 1.3%, 1.2%, 1.1%, 1.0%, 0.9%, 0.8%, 0.7%, 0.6%, 0.5%, 0.4%, 0.3%, 0.2%, 0.1%, 0%) relative to a baseline in the 30-days preceding the administration while receiving treatment with a GLP-1 agonist (e.g., semaglutide), and the subject also receives a GLP-1 agonist treatment (e.g., semaglutide) during the administration.

[2076] In some embodiments, prior to the administering, the subject has experienced a change in body weight of less than or equal to 2.5% (e.g., ≤2.4%, ≤2.3%, ≤2.2%, ≤2.1%, ≤2.0%, ≤1.9%, ≤1.8%, ≤1.7%, ≤1.6%, ≤1.5%, ≤1.4%, ≤1.3%, ≤1.2%, ≤1.1%, ≤1.0%, ≤0.9%, ≤0.8%, ≤0.7%, ≤0.6%, ≤0.5%, ≤0.4%, ≤0.3%, ≤0.2%, ≤0.1%; 2.4%, ≤2.3%, 2.2%, 2.1%, 2.0%, 1.9%, 1.8%, 1.7%, 1.6%, 1.5%, 1.4%, 1.3%, 1.2%, 1.1%, 1.0%, 0.9%, 0.8%, 0.7%, 0.6%, 0.5%, 0.4%, 0.3%, 0.2%, 0.1%, 0%) relative to a baseline in the 30-days preceding the administration while receiving treatment with a GLP-1 agonist (e.g., semaglutide), and the subject does not receive a GLP-1 agonist treatment (e.g., semaglutide) during the administration.

[2077] In some embodiments, the subject has a body mass index (BMI) of at least 30.0 kg/m² (e.g., 30 kg/m², 30.5 kg/m², 31 kg/m², 31.5 kg/m², 32 kg/m², 32.5 kg/m², 33 kg/m², 33.5 kg/m², 34 kg/m², 34.5 kg/m², 35 kg/m², 35.5 kg/m², 36 kg/m², 36.5 kg/m², 37 kg/m², 37.5 kg/m², 38 kg/m², 38.5 kg/m², 39 kg/m², 39.5 kg/m², 40 kg/m²).

[2078] In some embodiments, the subject has a body mass index (BMI) in the range of 30.0 kg/m² to 40.0 kg/m², inclusive of the endpoints.

[2079] In some embodiments, the subject is a human subject.

[2080] In some embodiments, the administration reduces body weight. In some embodiments, the administration reduces body weight gain. In some embodiments, the administration reduces fat mass.

[2081] In some embodiments, the administration provides one or more sustained beneficial effect(s).

[2082] Another aspect of the disclosure provides a polypeptide, molecule, or pharmaceutical composition disclosed herein for use in treating obesity.

[2083] Still another aspect of the disclosure provides use of a polypeptide, molecule, or pharmaceutical composition disclosed herein in the manufacture of a medicament for treating obesity.

[2084] Another aspect of the disclosure provides a method of stimulating insulin secretion from a cell, the method comprising contacting the cell with a polypeptide, molecule, or pharmaceutical composition disclosed herein. In some embodiments, the cell is a human pancreatic microislet cell.

[2085] Yet another aspect of the disclosure provides a method of reducing body weight and/or food intake in a subject in need thereof, the method comprising administering a polypeptide, molecule, or pharmaceutical composition disclosed herein to the subject. In some embodiments, the administration reduces body weight. In some embodiments, the administration reduces food intake. In some embodiments, the administration reduces body weight and food intake.

[2086] In some embodiments, prior to the administering, the subject has received prior treatment with a GLP-1 agonist (e.g., semaglutide). In other embodiments, prior to the administering, the subject has not received prior treatment with a GLP-1 agonist (e.g., semaglutide).

[2087] In some embodiments, the subject also receives a GLP-1 agonist treatment (e.g., semaglutide) during the administration. In other embodiments, the subject does not receive a GLP-1 agonist treatment (e.g., semaglutide) during the administration.

[2088] In some embodiments, prior to the administering, the subject has received prior treatment with a GLP-1 agonist (e.g., semaglutide), and the subject also receives a GLP-1 agonist treatment (e.g., semaglutide) during the administration.

[2089] In some embodiments, prior to the administering, the subject has not received prior treatment with a GLP-1 agonist (e.g., semaglutide), but the subject also receives a GLP-1 agonist treatment (e.g., semaglutide) during the administration.

[2090] In some embodiments, prior to the administering, the subject has received prior treatment with a GLP-1 agonist (e.g., semaglutide), but the subject does not receive a GLP-1 agonist treatment (e.g., semaglutide) during the administration.

[2091] In some embodiments, prior to the administering, the subject has not received prior treatment with a GLP-1 agonist (e.g., semaglutide), and the subject does not receive a GLP-1 agonist treatment (e.g., semaglutide) during the administration.

[2092] In some embodiments, prior to the administering, the subject is experiencing a weight-loss plateau. In some embodiments, prior to the administering, the subject is experiencing a weight-loss plateau while receiving treatment with a GLP-1 agonist (e.g., semaglutide).

[2093] In some embodiments, prior to the administering, the subject is experiencing a weight-loss plateau while receiving treatment with a GLP-1 agonist (e.g., semaglutide), and the subject also receives a GLP-1 agonist treatment (e.g., semaglutide) during the administration.

[2094] In some embodiments, prior to the administering, the subject is experiencing a weight-loss plateau while receiving treatment with a GLP-1 agonist (e.g., semaglutide), and the subject does not receive a GLP-1 agonist treatment (e.g., semaglutide) during the administration.

[2095] In some embodiments, prior to the administering, the subject has experienced a change in body weight of less than or equal to 2.5% (e.g., ≤2.4%, ≤2.3%, ≤2.2%, ≤2.1%, ≤2.0%, ≤1.9%, ≤1.8%, ≤1.7%, ≤1.6%, ≤1.5%, ≤1.4%, ≤1.3%, ≤1.2%, ≤1.1%, ≤1.0% 0.9%, ≤0.8%, ≤0.7%, ≤0.6%, ≤0.5%, 0.4%, ≤0.3% 0.2%, ≤0.1%; 2.4%, 2.3%, 2.2%, 2.1%, 2.0%, 1.9%, 1.8%, 1.7%, 1.6%, 1.5%, 1.4%, 1.3%, 1.2%, 1.1%, 1.0%, 0.9%, 0.8%, 0.7%, 0.6%, 0.5%, 0.4%, 0.3%, 0.2%, 0.1%, 0%) relative to a baseline in the 30-days preceding the administration. In some embodiments, the baseline is the subject's body weight 30-days prior to the administration. In some embodiments, the baseline is the subject's body weight prior to a first dose of a GLP-1 agonist (semaglutide).

[2096] In some embodiments, prior to the administering, the subject has experienced a change in body weight of less than or equal to 2.5% (e.g., ≤2.4%, ≤2.3%, ≤2.2%, ≤2.1%, ≤2.0%, ≤1.9%, ≤1.8%, ≤1.7%, ≤1.6%, ≤1.5%, ≤1.4%, ≤1.3%, ≤1.2%, ≤1.1%, ≤1.0% 0.9%, ≤0.8%, ≤0.7%, ≤0.6%, ≤0.5%, ≤0.4%, ≤0.3%, ≤0.2%, ≤0.1%; 2.4%, 2.3%, 2.2%, 2.1%, 2.0%, 1.9%, 1.8%, 1.7%, 1.6%, 1.5%, 1.4%, 1.3%, 1.2%, 1.1%, 1.0%, 0.9%, 0.8%, 0.7%, 0.6%, 0.5%, 0.4%, 0.3%, 0.2%, 0.1%, 0%) relative to a baseline in the 30-days preceding the administration while receiving treatment with a GLP-1 agonist (e.g., semaglutide). In some embodiments, the baseline is the subject's body weight 30-days prior to the administration. In some embodiments, the baseline is the subject's body weight prior to a first dose of a GLP-1 agonist.

[2097] In some embodiments, prior to the administering, the subject has experienced a change in body weight of less than or equal to 2.5% (e.g., ≤2.4%, ≤2.3%, ≤2.2%, ≤2.1%, ≤2.0%, ≤1.9%, ≤1.8%, ≤1.7%, ≤1.6%, ≤1.5%, ≤1.4%, ≤1.3%, ≤1.2%, ≤1.1%, ≤1.0% 0.9%, ≤0.8%, ≤0.7%, ≤0.6%, ≤0.5%, ≤0.4%, ≤0.3%, ≤0.2%, ≤0.1%; 2.4%, 2.3%, 2.2%, 2.1%, 2.0%, 1.9%, 1.8%, 1.7%, 1.6%, 1.5%, 1.4%, 1.3%, 1.2%, 1.1%, 1.0%, 0.9%, 0.8%, 0.7%, 0.6%, 0.5%, 0.4%, 0.3%, 0.2%, 0.1%, 0%) relative to a baseline in the 30-days preceding the administration while receiving treatment with a GLP-1 agonist (e.g., semaglutide), and the subject also receives a GLP-1 agonist treatment (e.g., semaglutide) during the administration.

[2098] In some embodiments, prior to the administering, the subject has experienced a change in body weight of less than or equal to 2.5% (e.g., ≤2.4%, ≤2.3%, ≤2.2%, ≤2.1%, ≤2.0%, ≤1.9%, ≤1.8%, ≤1.7%, ≤1.6%, ≤1.5%, ≤1.4%, ≤1.3%, ≤1.2%, ≤1.1%, ≤1.0%, ≤0.9%, ≤0.8%, ≤0.7%, ≤0.6%, ≤0.5%, ≤0.4%, ≤0.3%, ≤0.2%, ≤0.1%; 2.4%, 2.3%, 2.2%, 2.1%, 2.0%, 1.9%, 1.8%, 1.7%, 1.6%, 1.5%, 1.4%, 1.3%, 1.2%, 1.1%, 1.0%, 0.9%, 0.8%, 0.7%, 0.6%, 0.5%, 0.4%, 0.3%, 0.2%, 0.1%, 0%) relative to a baseline in the 30-days preceding the administration while receiving treatment with a GLP-1 agonist (e.g., semaglutide), and the subject does not receive a GLP-1 agonist treatment (e.g., semaglutide) during the administration.

[2099] In some embodiments, the subject is overweight or obese. In some embodiments, the subject is overweight. In some embodiments, the subject is obese.

[2100] In some embodiments, the subject has a body mass index (BMI) of at least 25.0 kg/m² (e.g., 25 kg/m², 25.5 kg/m², 26 kg/m², 26.5 kg/m², 27 kg/m², 27.5 kg/m², 28 kg/m², 28.5 kg/m², 29 kg/m², 29.5 kg/m², 30 kg/m², 30.5 kg/m², 31 kg/m², 31.5 kg/m², 32 kg/m², 32.5 kg/m², 33 kg/m², 33.5 kg/m², 34 kg/m², 34.5 kg/m², 35 kg/m², 35.5 kg/m², 36 kg/m², 36.5 kg/m², 37 kg/m², 37.5 kg/m², 38 kg/m², 38.5 kg/m², 39 kg/m², 39.5 kg/m², 40 kg/m²). In some embodiments, the subject has a body mass index (BMI) of at least 30.0 kg/m².

[2101] In some embodiments, the subject has a body mass index (BMI) in the range of 25.0 kg/m² to 29.9 kg/m², inclusive of the endpoints.

[2102] In some embodiments, the subject has a body mass index (BMI) in the range of 30.0 kg/m² to 40.0 kg/m², inclusive of the endpoints.

[2103] In some embodiments, the subject is a human subject.

[2104] Another aspect of the disclosure provides a polypeptide, molecule, or pharmaceutical composition disclosed herein for use in reducing body weight and/or food intake in a subject in need thereof. Still another aspect of the disclosure provides a use of a polypeptide, molecule, or pharmaceutical composition disclosed herein in the manufacture of a medicament for reducing body weight and/or food intake in a subject in need thereof.

[2105] Another aspect of the disclosure provides a GCGR agonist and a GIPR antagonist for use in therapy. Yet another aspect of the disclosure provides a GCGR agonist for use in therapy in combination with a GIPR antagonist. Still another aspect provides a GIPR antagonist for use in therapy in combination with a GCGR agonist. In some cases, the GCGR agonist and the GIPR antagonist may be used in acute therapy. In other cases, the GCGR agonist and the GIPR antagonist may be used in chronic therapy. The GCGR agonist and the GIPR antagonist may be present in the same or separate pharmaceutical compositions.

[2106] Another aspect of the disclosure provides a use of a GCGR agonist and a GIPR antagonist in the preparation of a medicament. Yet another aspect of the disclosure provides a use of a GCGR agonist in the preparation of a medicament for use in combination therapy with a GIPR antagonist. Still another aspect of the disclosure provides a use of a GIPR antagonist in the preparation of a medicament for use in combination therapy with a GCGR agonist.

[2107] Another aspect of the disclosure provides a method of treating obesity in a subject in need thereof, the method comprising administering a glucagon receptor (GCGR) agonist and a GIPR antagonist to the subject. Still another aspect of the disclosure provides a method of reducing body weight and/or food intake in a subject in need thereof, the method comprising administering a glucagon receptor (GCGR) agonist and a GIPR antagonist to the subject.

[2108] In some embodiments, therapeutically effective amounts of the GCGR agonist and the GIPR antagonist are combined prior to administration to the subject.

[2109] In some embodiments, the GCGR agonist is administered to the subject concurrently with the GIPR antagonist.

[2110] In some embodiments, therapeutically effective amounts of the GCGR agonist and the GIPR antagonist are administered to the subject sequentially. In some embodiments, the GCGR agonist is administered to the subject after the GIPR antagonist. In some embodiments, the GCGR agonist is administered to the subject before the GIPR antagonist.

[2111] In some embodiments, the therapeutically effective amounts of the GCGR agonist and the GIPR antagonist are synergistically effective amounts.

[2112] In some embodiments, prior to the administering, the subject received a prior therapy comprising a GLP-1 agonist, such as, e.g., semaglutide.

[2113] In some embodiments, prior to the administering, the subject received a prior therapy comprising a GCGR agonist. In some embodiments, prior to the administering, the subject received a prior therapy comprising a GIPR antagonist.

[2114] In some embodiments, prior to the administering, the subject has received prior treatment with a GLP-1 agonist (e.g., semaglutide). In other embodiments, prior to the administering, the subject has not received prior treatment with a GLP-1 agonist (e.g., semaglutide).

[2115] In some embodiments, the subject also receives a GLP-1 agonist treatment (e.g., semaglutide) during the administration.

[2116] In some embodiments, the subject does not receive a GLP-1 agonist treatment (e.g., semaglutide) during the administration.

[2117] In some embodiments, prior to the administering, the subject has received prior treatment with a GLP-1 agonist (e.g., semaglutide), and the subject also receives a GLP-1 agonist treatment (e.g., semaglutide) during the administration.

[2118] In some embodiments, prior to the administering, the subject has not received prior treatment with a GLP-1 agonist (e.g., semaglutide), but the subject also receives a GLP-1 agonist treatment (e.g., semaglutide) during the administration.

[2119] In some embodiments, prior to the administering, the subject has received prior treatment with a GLP-1 agonist (e.g., semaglutide), but the subject does not receive a GLP-1 agonist treatment (e.g., semaglutide) during the administration.

[2120] In some embodiments, prior to the administering, the subject has not received prior treatment with a GLP-1 agonist (e.g., semaglutide), and the subject does not receive a GLP-1 agonist treatment (e.g., semaglutide) during the administration.

[2121] In some embodiments, prior to the administering, the subject is experiencing a weight-loss plateau. In some embodiments, prior to the administering, the subject is experiencing a weight-loss plateau while receiving treatment with a GLP-1 agonist (e.g., semaglutide).

[2122] In some embodiments, prior to the administering, the subject is experiencing a weight-loss plateau while receiving treatment with a GLP-1 agonist (e.g., semaglutide), and the subject also receives a GLP-1 agonist treatment (e.g., semaglutide) during the administration.

[2123] In some embodiments, prior to the administering, the subject is experiencing a weight-loss plateau while receiving treatment with a GLP-1 agonist (e.g., semaglutide), and the subject does not receive a GLP-1 agonist treatment (e.g., semaglutide) during the administration.

[2124] In some embodiments, prior to the administering, the subject has experienced a change in body weight of less than or equal to 2.5% (e.g., ≤2.4%, ≤2.3%, ≤2.2%, ≤2.1%, ≤2.0%, ≤1.9%, ≤1.8%, ≤1.7%, ≤1.6%, ≤1.5%, ≤1.4%, ≤1.3%, ≤1.2%, ≤1.1%, ≤1.0% 0.9%, ≤0.8%, ≤0.7%, ≤0.6%, ≤0.5%, ≤0.4%, ≤0.3%, 0.2%, ≤0.1%; 2.4%, 2.3%, 2.2%, 2.1%, 2.0%, 1.9%, 1.8%, 1.7%, 1.6%, 1.5%, 1.4%, 1.3%, 1.2%, 1.1%, 1.0%, 0.9%, 0.8%, 0.7%, 0.6%, 0.5%, 0.4%, 0.3%, 0.2%, 0.1%, 0%) relative to a baseline in the 30-days preceding the administration. In some embodiments, the baseline is the subject's body weight 30-days prior to the administration. In some embodiments, the baseline is the subject's body weight prior to a first dose of a GLP-1 agonist (semaglutide).

[2125] In some embodiments, prior to the administering, the subject has experienced a change in body weight of less than or equal to 2.5% (e.g., ≤2.4%, ≤2.3%, ≤2.2%, ≤2.1%, ≤2.0%, ≤1.9%, ≤1.8%, ≤1.7%, ≤1.6%, ≤1.5%, ≤1.4%, ≤1.3%, ≤1.2%, ≤1.1%, ≤1.0%, ≤0.9%, ≤0.8%, ≤0.7%, ≤0.6%, ≤0.5%, ≤0.4%, ≤0.3%, ≤0.2%, ≤0.1%; 2.4%, 2.3%, 2.2%, 2.1%, 2.0%, 1.9%, 1.8%, 1.7%, 1.6%, 1.5%, 1.4%, 1.3%, 1.2%, 1.1%, 1.0%, 0.9%, 0.8%, 0.7%, 0.6%, 0.5%, 0.4%, 0.3%, 0.2%, 0.1%, 0%) relative to a baseline in the 30-days preceding the administration while receiving treatment with a GLP-1 agonist (e.g., semaglutide). In some embodiments, the baseline is the subject's body weight 30-days prior to the administration. In some embodiments, the baseline is the subject's body weight prior to a first dose of a GLP-1 agonist.

[2126] In some embodiments, prior to the administering, the subject has experienced a change in body weight of less than or equal to 2.5% (e.g., ≤2.4%, ≤2.3%, ≤2.2%, ≤2.1%, ≤2.0%, ≤1.9%, ≤1.8%, ≤1.7%, ≤1.6%, ≤1.5%, ≤1.4%, ≤1.3%, ≤1.2%, ≤1.1%, ≤1.0% 0.9%, ≤0.8%, ≤0.7%, ≤0.6%, ≤0.5%, ≤0.4%, ≤0.3%, ≤0.2%, ≤0.1%; 2.4%, 2.3%, 2.2%, 2.1%, 2.0%, 1.9%, 1.8%, 1.7%, 1.6%, 1.5%, 1.4%, 1.3%, 1.2%, 1.1%, 1.0%, 0.9%, 0.8%, 0.7%, 0.6%, 0.5%, 0.4%, 0.3%, 0.2%, 0.1%, 0%) relative to a baseline in the 30-days preceding the administration while receiving treatment with a GLP-1 agonist (e.g., semaglutide), and the subject also receives a GLP-1 agonist treatment (e.g., semaglutide) during the administration.

[2127] In some embodiments, prior to the administering, the subject has experienced a change in body weight of less than or equal to 2.5% (e.g., ≤2.4%, ≤2.3%, ≤2.2%, ≤2.1%, ≤2.0%, ≤1.9%, ≤1.8%, ≤1.7%, ≤1.6%, ≤1.5%, ≤1.4%, ≤1.3%, ≤1.2%, ≤1.1%, ≤1.0% 0.9%, 0.8%, ≤0.7%, ≤0.6%, ≤0.5%, ≤0.4%, ≤0.3%, 0.2% 0.1%; 2.4%, 2.3%, 2.2%, 2.1%, 2.0%, 1.9%, 1.8%, 1.7%, 1.6%, 1.5%, 1.4%, 1.3%, 1.2%, 1.1%, 1.0%, 0.9%, 0.8%, 0.7%, 0.6%, 0.5%, 0.4%, 0.3%, 0.2%, 0.1%, 0%) relative to a baseline in the 30-days preceding the administration while receiving treatment with a GLP-1 agonist (e.g., semaglutide), and the subject does not receive a GLP-1 agonist treatment (e.g., semaglutide) during the administration.

[2128] In some embodiments, the subject has a body mass index (BMI) of at least 30.0 kg/m² (e.g., 30 kg/m², 30.5 kg/m², 31 kg/m², 31.5 kg/m², 32 kg/m², 32.5 kg/m², 33 kg/m², 33.5 kg/m², 34 kg/m², 34.5 kg/m², 35 kg/m², 35.5 kg/m², 36 kg/m², 36.5 kg/m², 37 kg/m², 37.5 kg/m², 38 kg/m², 38.5 kg/m², 39 kg/m², 39.5 kg/m², 40 kg/m²).

[2129] In some embodiments, the subject has a body mass index (BMI) in the range of 30.0 kg/m² to 40.0 kg/m², inclusive of the endpoints.

[2130] In some embodiments, the subject is a human subject.

[2131] In some embodiments, the administration reduces body weight. In some embodiments, the administration reduces body weight gain. In some embodiments, the administration reduces fat mass.

[2132] In some embodiments, the administration lowers blood glucose, insulin, triglyceride, or cholesterol levels; reduces body weight; or improves glucose tolerance, energy expenditure, or insulin sensitivity. In some embodiments, the administration lowers blood glucose, insulin, triglyceride, or cholesterol levels. In some embodiments, the administration lowers blood glucose levels. In some embodiments, the administration lowers insulin levels. In some embodiments, the administration lowers triglyceride levels. In some embodiments, the administration lowers cholesterol levels. In some embodiments, the administration reduces body weight. In some embodiments, the administration improves glucose tolerance, energy expenditure, or insulin sensitivity. In some embodiments, the administration improves glucose tolerance. In some embodiments, the administration improves energy expenditure. In some embodiments, the administration improves insulin sensitivity.

[2133] In some embodiments, administration of the GCGR agonist in combination with the GIPR antagonist provides one or more sustained beneficial effect(s).

### Combination Therapies

[2134] Polypeptides and molecules disclosed herein can be co-administered with other active ingredients, if desired. The identity and properties of other active ingredients will depend on the nature of the condition to be treated or ameliorated.

[2135] Illustratively, the present disclosure provides methods for combination therapies in which a GLP-1 agonist (e.g., semaglutide) is used in combination with a polypeptide or molecule disclosed herein. In some cases, the polypeptides and molecules of the disclosure can be administered simultaneously, separately, or sequentially with an effective amount of a GLP-1 agonist (e.g., semaglutide) in any of the methods described herein. In some embodiments, the GLP-1 agonist (e.g., semaglutide) is administered as a pharmaceutical composition comprising the GLP-1 agonist (e.g., semaglutide) and a pharmaceutically acceptable excipient.

[2136] For example, provided herein is a method of treating obesity in a subject in need thereof, the method comprising administering a polypeptide, molecule, or pharmaceutical composition disclosed herein to the subject in combination with a GLP-1 agonist (e.g., semaglutide).

[2137] In some embodiments, the subject is overweight or obese. In some embodiments, the subject is overweight. In some embodiments, the subject is obese.

[2138] In some embodiments, the subject has a body mass index (BMI) of at least 25.0 kg/m² (e.g., 25 kg/m², 25.5 kg/m², 26 kg/m², 26.5 kg/m², 27 kg/m², 27.5 kg/m², 28 kg/m², 28.5 kg/m², 29 kg/m², 29.5 kg/m², 30 kg/m², 30.5 kg/m², 31 kg/m², 31.5 kg/m², 32 kg/m², 32.5 kg/m², 33 kg/m², 33.5 kg/m², 34 kg/m², 34.5 kg/m², 35 kg/m², 35.5 kg/m², 36 kg/m², 36.5 kg/m², 37 kg/m², 37.5 kg/m², 38 kg/m², 38.5 kg/m², 39 kg/m², 39.5 kg/m², 40 kg/m²). In some embodiments, the subject has a body mass index (BMI) of at least 30.0 kg/m².

[2139] In some embodiments, the subject has a body mass index (BMI) in the range of 25.0 kg/m² to 29.9 kg/m², inclusive of the endpoints.

[2140] In some embodiments, the subject has a body mass index (BMI) in the range of 30.0 kg/m² to 40.0 kg/m², inclusive of the endpoints.

[2141] In some embodiments, the subject is a human subject.

[2142] In some embodiments, the GLP-1 agonist (e.g., semaglutide) and the polypeptide, molecule, or pharmaceutical composition are administered in consecutive, non-overlapping dosing intervals, wherein the GLP-1 agonist (e.g., semaglutide) is administered prior to the polypeptide, molecule, or pharmaceutical composition.

[2143] In some embodiments, the GLP-1 agonist (e.g., semaglutide) and the polypeptide, molecule, or pharmaceutical composition are administered concurrently.

[2144] In some embodiments, at least one dose of the GLP-1 agonist (e.g., semaglutide) is administered prior to a first administration of the polypeptide, molecule, or pharmaceutical composition.

[2145] In some embodiments, prior to the administering, the subject has received prior treatment with a GLP-1 agonist (e.g., semaglutide). In other embodiments, prior to the administering, the subject has not received prior treatment with a GLP-1 agonist (e.g., semaglutide).

[2146] In some embodiments, prior to the administering, the subject is experiencing a weight-loss plateau. In some embodiments, prior to the administering, the subject is experiencing a weight-loss plateau while receiving treatment with a GLP-1 agonist (e.g., semaglutide).

[2147] In some embodiments, prior to the administering, the subject has experienced a change in body weight of less than or equal to 2.5% (e.g., ≤2.4%, ≤2.3%, ≤2.2%, ≤2.1%, ≤2.0%, ≤1.9%, ≤1.8%, ≤1.7%, ≤1.6%, ≤1.5%, ≤1.4%, ≤1.3%, ≤1.2%, ≤1.1%, ≤1.0%, ≤0.9%, ≤0.8%, ≤0.7%, ≤0.6%, ≤0.5%, 0.4% 0.3% 0.2%, ≤0.1%; 2.4%, 2.3%, 2.2%, 2.1%, 2.0%, 1.9%, 1.8%, 1.7%, 1.6%, 1.5%, 1.4%, 1.3%, 1.2%, 1.1%, 1.0%, 0.9%, 0.8%, 0.7%, 0.6%, 0.5%, 0.4%, 0.3%, 0.2%, 0.1%, 0%) relative to a baseline in the 30-days preceding the administration. In some embodiments, the baseline is the subject's body weight 30-days prior to the administration. In some embodiments, the baseline is the subject's body weight prior to a first dose of a GLP-1 agonist (semaglutide).

[2148] Also provided herein is a method of reducing body weight and/or food intake in a subject in need thereof, the method comprising administering a polypeptide, molecule, or pharmaceutical composition disclosed herein to the subject in combination with a GLP-1 agonist (e.g., semaglutide).

[2149] In some embodiments, the subject is overweight or obese. In some embodiments, the subject is overweight. In some embodiments, the subject is obese.

[2150] In some embodiments, the subject has a body mass index (BMI) of at least 25.0 kg/m² (e.g., 25 kg/m², 25.5 kg/m², 26 kg/m², 26.5 kg/m², 27 kg/m², 27.5 kg/m², 28 kg/m², 28.5 kg/m², 29 kg/m², 29.5 kg/m², 30 kg/m², 30.5 kg/m², 31 kg/m², 31.5 kg/m², 32 kg/m², 32.5 kg/m², 33 kg/m², 33.5 kg/m², 34 kg/m², 34.5 kg/m², 35 kg/m², 35.5 kg/m², 36 kg/m², 36.5 kg/m², 37 kg/m², 37.5 kg/m², 38 kg/m², 38.5 kg/m², 39 kg/m², 39.5 kg/m², 40 kg/m²). In some embodiments, the subject has a body mass index (BMI) of at least 30.0 kg/m².

[2151] In some embodiments, the subject has a body mass index (BMI) in the range of 25.0 kg/m² to 29.9 kg/m², inclusive of the endpoints.

[2152] In some embodiments, the subject has a body mass index (BMI) in the range of 30.0 kg/m² to 40.0 kg/m², inclusive of the endpoints.

[2153] In some embodiments, the subject is a human subject.

[2154] In some embodiments, the GLP-1 agonist (e.g., semaglutide) and the polypeptide, molecule, or pharmaceutical composition are administered in consecutive, non-overlapping dosing intervals, wherein the GLP-1 agonist (e.g., semaglutide) is administered prior to the polypeptide, molecule, or pharmaceutical composition.

[2155] In some embodiments, the GLP-1 agonist (e.g., semaglutide) and the polypeptide, molecule, or pharmaceutical composition are administered concurrently.

[2156] In some embodiments, at least one dose of the GLP-1 agonist (e.g., semaglutide) is administered prior to a first administration of the polypeptide, molecule, or pharmaceutical composition.

[2157] In some embodiments, prior to the administering, the subject has received prior treatment with a GLP-1 agonist (e.g., semaglutide). In other embodiments, prior to the administering, the subject has not received prior treatment with a GLP-1 agonist (e.g., semaglutide).

[2158] In some embodiments, prior to the administering, the subject is experiencing a weight-loss plateau. In some embodiments, prior to the administering, the subject is experiencing a weight-loss plateau while receiving treatment with a GLP-1 agonist (e.g., semaglutide).

[2159] In some embodiments, prior to the administering, the subject has experienced a change in body weight of less than or equal to 2.5% (e.g., ≤2.4%, ≤2.3%, ≤2.2%, ≤2.1%, ≤2.0%, 1.9%, ≤1.8%, ≤1.7%, ≤1.6%, ≤1.5%, ≤1.4%, ≤1.3%, ≤1.2%, ≤1.1%, ≤1.0% 0.9%, ≤0.8%, ≤0.7%, ≤0.6%, ≤0.5%, ≤0.4%, ≤0.3% 0.2%, ≤0.1%; 2.4%, 2.3%, 2.2%, 2.1%, 2.0%, 1.9%, 1.8%, 1.7%, 1.6%, 1.5%, 1.4%, 1.3%, 1.2%, 1.1%, 1.0%, 0.9%, 0.8%, 0.7%, 0.6%, 0.5%, 0.4%, 0.3%, 0.2%, 0.1%, 0%) relative to a baseline in the 30-days preceding the administration. In some embodiments, the baseline is the subject's body weight 30-days prior to the administration. In some embodiments, the baseline is the subject's body weight prior to a first dose of a GLP-1 agonist (semaglutide).

[2160] Provided herein is a GLP-1 agonist (e.g., semaglutide) and a polypeptide or molecule disclosed herein for use in treating obesity. Also provided herein is a GLP-1 agonist for use in treating obesity in combination with a polypeptide or molecule disclosed herein. Further provided herein is a polypeptide or molecule disclosed herein for use in treating obesity in combination with a GLP-1 agonist (e.g., semaglutide).

[2161] Provided herein is a GLP-1 agonist (e.g., semaglutide) and a polypeptide or molecule disclosed herein for use in reducing body weight and/or food intake in a subject in need thereof. Also provided herein is a GLP-1 agonist for use in reducing body weight and/or food intake in a subject in need thereof in combination with a polypeptide or molecule disclosed herein. Further provided herein is a polypeptide or molecule disclosed herein for use in reducing body weight and/or food intake in a subject in need thereof in combination with a GLP-1 agonist (e.g., semaglutide).

[2162] Provided herein is a use of a GLP-1 agonist (e.g., semaglutide) and a polypeptide or molecule disclosed herein for the manufacture of a medicament for treating obesity. Also provided herein is a use of a GLP-1 agonist (e.g., semaglutide) for the manufacture of a medicament for treating obesity in combination with a polypeptide or molecule disclosed herein. Further provided herein is a use of a polypeptide or a molecule disclosed herein for the manufacture of a medicament for treating obesity in combination with a GLP-1 agonist (e.g., semaglutide).

[2163] Provided herein is a use of a GLP-1 agonist (e.g., semaglutide) and a polypeptide or molecule disclosed herein for the manufacture of a medicament for reducing body weight and/or food intake in a subject in need thereof. Also provided herein is a use of a GLP-1 agonist (e.g., semaglutide) for the manufacture of a medicament for reducing body weight and/or food intake in a subject in need thereof in combination with a polypeptide or molecule disclosed herein. Further provided herein is a use of a polypeptide or a molecule disclosed herein for the manufacture of a medicament for reducing body weight and/or food intake in a subject in need thereof in combination with a GLP-1 agonist (e.g., semaglutide).

### Kits

[2164] Also provided herein are kits for practicing the disclosed methods. Such kits can comprise a pharmaceutical composition, such as those described herein, which can be provided in a sterile container. Optionally, instructions on how to employ the provided pharmaceutical composition in weight management and/or the treatment of obesity can also be included or be made available to a patient or a medical service provider.

[2165] In one aspect, a kit comprises (a) a pharmaceutical composition disclosed herein; and (b) one or more containers for the pharmaceutical composition. Such a kit can also comprise instructions for the use thereof; the instructions can be tailored to the patient population being treated. In some cases, the instructions can describe the use and nature of the materials provided in the kit. For example, in some embodiments, the kit comprises instructions for a patient to carry out administration.

[2166] The optional instructions can be printed on a substrate, such as paper or plastic, etc., and can be present in a kit as a package insert, in the labeling of the container of the kit or components thereof (e.g., associated with the packaging), etc. In some embodiments, the instructions are present as an electronic storage data file present on a suitable computer readable storage medium, such as, e.g., a CD-ROM, diskette, etc. In other embodiments, the actual instructions are not present in the kit, but means for obtaining the instructions from a remote source, such as over the internet, are provided. Illustratively, in some embodiments, the kit includes a web address where the instructions can be viewed and/or from which the instructions can be downloaded.

[2167] Often it will be desirable that some or all components of a kit are packaged in suitable packaging to maintain sterility. In some embodiments, the components of a kit can be packaged in a kit containment element to make a single, easily handled unit, where the kit containment element, e.g., box or analogous structure, may or may not be an airtight container, e.g., to further preserve the sterility of some or all of the components of the kit.

### Additional Non-Limiting Example Embodiments

[2168] Non-limiting example embodiments of the present disclosure also include:

[2169] E1. A polypeptide that agonizes a glucagon receptor (“GCGR”), wherein:
[2170] the polypeptide comprises at least 25 amino acids, wherein the polypeptide comprises 5-bromo-tryptophan at position 25; and
[2171] the polypeptide has at least 79% sequence identity to the amino acid sequence of SEQ ID NO: 1587.

[2172] E2. The polypeptide of E1, wherein the polypeptide has at least 82% sequence identity to the amino acid sequence of SEQ ID NO: 1587.

[2173] E3. The polypeptide of E1 or E2, wherein the polypeptide has at least 86% sequence identity to the amino acid sequence of SEQ ID NO: 1587.

[2174] E4. The polypeptide of any one of E1 to E3, wherein the polypeptide has at least 89% sequence identity to the amino acid sequence of SEQ ID NO: 1587.

[2175] E5. The polypeptide of any one of E1 to E4, wherein the polypeptide has at least 93% sequence identity to the amino acid sequence of SEQ ID NO: 1587.

[2176] E6. The polypeptide of any one of E1 to E5, wherein the polypeptide has at least 96% sequence identity to the amino acid sequence of SEQ ID NO: 1587.

[2177] E7. The polypeptide of E1, wherein the polypeptide comprises the amino acid sequence of any one of SEQ ID NOs: 1587-1595.

[2178] E8. The polypeptide of E1, wherein the polypeptide comprises the amino acid sequence of SEQ ID NO: 1587.

[2179] E9. The polypeptide of E1, wherein the polypeptide consists of the amino acid sequence of SEQ ID NO: 1587.

[2180] E10. The polypeptide of E1, wherein the polypeptide comprises the amino acid sequence of SEQ ID NO: 1588.

[2181] E11. The polypeptide of E1, wherein the polypeptide consists of the amino acid sequence of SEQ ID NO: 1588.

[2182] E12. The polypeptide of E1, wherein the polypeptide comprises the amino acid sequence of SEQ ID NO: 1589.

[2183] E13. The polypeptide of E1, wherein the polypeptide consists of the amino acid sequence of SEQ ID NO: 1589.

[2184] E14. The polypeptide of E1, wherein the polypeptide comprises the amino acid sequence of SEQ ID NO: 1590.

[2185] E15. The polypeptide of E1, wherein the polypeptide consists of the amino acid sequence of SEQ ID NO: 1590.

[2186] E16. The polypeptide of E1, wherein the polypeptide comprises the amino acid sequence of SEQ ID NO: 1591.

[2187] E17. The polypeptide of E1, wherein the polypeptide consists of the amino acid sequence of SEQ ID NO: 1591.

[2188] E18. The polypeptide of E1, wherein the polypeptide comprises the amino acid sequence of SEQ ID NO: 1592.

[2189] E19. The polypeptide of E1, wherein the polypeptide consists of the amino acid sequence of SEQ ID NO: 1592.

[2190] E20. The polypeptide of E1, wherein the polypeptide comprises the amino acid sequence of SEQ ID NO: 1593.

[2191] E21. The polypeptide of E1, wherein the polypeptide consists of the amino acid sequence of SEQ ID NO: 1593.

[2192] E22. The polypeptide of E1, wherein the polypeptide comprises the amino acid sequence of SEQ ID NO: 1594.

[2193] E23. The polypeptide of E1, wherein the polypeptide consists of the amino acid sequence of SEQ ID NO: 1594.

[2194] E24. The polypeptide of E1, wherein the polypeptide comprises the amino acid sequence of SEQ ID NO: 1595.

[2195] E25. The polypeptide of E1, wherein the polypeptide consists of the amino acid sequence of SEQ ID NO: 1595.

[2196] E26. The polypeptide of E1, comprising at least 27 amino acids.

[2197] E27. The polypeptide of E26, wherein the polypeptide further comprises one or more of:
[2198] d-serine at position 2;
[2199] 2-aminoisobutyric acid at position 16;
[2200] lysine at position 17;
[2201] β-(2-naphthyl)-L-alanine at position 18;
[2202] aspartic acid, lysine, alanine, or glutamic acid at position 24; and
[2203] leucine at position 27.

[2204] E28. The polypeptide of any one of E1, E26, or E27, wherein the polypeptide further comprises d-serine at position 2.

[2205] E29. The polypeptide of any one of E1 or E26-E28, wherein the polypeptide further comprises 2-aminoisobutyric acid at position 16.

[2206] E30. The polypeptide of any one of E1 or E26-E29, wherein the polypeptide further comprises lysine at position 17.

[2207] E31. The polypeptide of any one of E1 or E26-E30, wherein the polypeptide further comprises β-(2-naphthyl)-L-alanine at position 18.

[2208] E32. The polypeptide of any one of E1 or E26-E31, wherein the polypeptide further comprises aspartic acid at position 24.

[2209] E33. The polypeptide of any one of E1 or E26-E31, wherein the polypeptide further comprises lysine at position 24.

[2210] E34. The polypeptide of any one of E1 or E26-E31, wherein the polypeptide further comprises alanine at position 24.

[2211] E35. The polypeptide of any one of E1 or E26-E31, wherein the polypeptide further comprises glutamic acid at position 24.

[2212] E36. The polypeptide of any one of E1 or E26-E35, wherein the polypeptide further comprises leucine at position 27.

[2213] E37. The polypeptide of any one of E1 or E26-E36, wherein the polypeptide comprises d-serine at position 2 and 2-aminoisobutyric acid at position 16.

[2214] E38. The polypeptide of any one of E1 or E26-E37, wherein the polypeptide comprises d-serine at position 2, 2-aminoisobutyric acid at position 16, and leucine at position 27.

[2215] E39. The polypeptide of any one of E1 or E26-E38, comprising at least 28 amino acids.

[2216] E40. The polypeptide of E36, wherein the polypeptide further comprises lysine or aspartic acid at position 28.

[2217] E41. The polypeptide of E36 or E37, wherein the polypeptide further comprises lysine at position 28.

[2218] E42. The polypeptide of E36 or E37, wherein the polypeptide further comprises aspartic acid at position 28.

[2219] E43. The polypeptide of E1 or E39, wherein the polypeptide further comprises d-serine at position 2, 2-aminoisobutyric acid at position 16, leucine at position 27, and lysine or aspartic acid at position 28.

[2220] E44. The polypeptide of E1 or E39, wherein the polypeptide further comprises d-serine at position 2, 2-aminoisobutyric acid at position 16, aspartic acid at position 24, leucine at position 27, and lysine at position 28.

[2221] E45. The polypeptide of E1 or E39, wherein the polypeptide further comprises d-serine at position 2, 2-aminoisobutyric acid at position 16, leucine at position 27, and lysine at position 28.

[2222] E46. The polypeptide of E1 or E39, wherein the polypeptide further comprises d-serine at position 2, 2-aminoisobutyric acid at position 16, lysine at position 24, leucine at position 27, and aspartic acid at position 28.

[2223] E47. The polypeptide of E1 or E39, wherein the polypeptide further comprises d-serine at position 2, 2-aminoisobutyric acid at position 16, aspartic acid at position 24, leucine at position 27, and lysine at position 28.

[2224] E48. The polypeptide of E1 or E39, wherein the polypeptide further comprises d-serine at position 2, 2-aminoisobutyric acid at position 16, lysine at position 17, alanine at position 24, leucine at position 27, and lysine at position 28.

[2225] E49. The polypeptide of E1 or E39, wherein the polypeptide further comprises d-serine at position 2, 2-aminoisobutyric acid at position 16, alanine at position 24, and lysine at position 28.

[2226] E50. The polypeptide of E1 or E39, wherein the polypeptide further comprises d-serine at position 2, 2-aminoisobutyric acid at position 16, lysine at position 17, glutamic acid at position 24, leucine at position 27, and lysine at position 28.

[2227] E51. The polypeptide of E1 or E39, wherein the polypeptide further comprises d-serine at position 2, 2-aminoisobutyric acid at position 16, β-(2-naphthyl)-L-alanine at position 18, lysine at position 24, leucine at position 27, and aspartic acid at position 28.

[2228] E52. The polypeptide of E1 or E39, wherein the polypeptide further comprises d-serine at position 2, 2-aminoisobutyric acid at position 16, β-(2-naphthyl)-L-alanine at position 18, alanine at position 24, leucine at position 27, and lysine at position 28.

[2229] E53. A polypeptide that agonizes a glucagon receptor (“GCGR”), wherein:
[2230] the polypeptide comprises at least 28 amino acids, wherein the polypeptide comprises 2-aminoisobutyric acid at position 16 and lysine, serine, or aspartic acid at position 28; and
[2231] the polypeptide has at least 89% sequence identity to the amino acid sequence of SEQ ID NO: 1596.

[2232] E54. The polypeptide of E53, wherein the polypeptide has at least 93% sequence identity to the amino acid sequence of SEQ ID NO: 1596.

[2233] E55. The polypeptide of E53, wherein the polypeptide has at least 96% sequence identity to the amino acid sequence of SEQ ID NO: 1596.

[2234] E56. The polypeptide of any one of E53-E56, wherein the polypeptide comprises lysine at position 28.

[2235] E57. The polypeptide of any one of E53-E56, wherein the polypeptide comprises serine at position 28.

[2236] E58. The polypeptide of any one of E53-E56, wherein the polypeptide comprises aspartic acid at position 28.

[2237] E59. The polypeptide of any one of E53-E58, wherein the polypeptide further comprises one or more of:
[2238] tyrosine at position 1;
[2239] d-serine, d-threonine, or 2-aminoisobutyric acid at position 2;
[2240] histidine at position 7;
[2241] lysine, citrulline, or glutamine at position 17;
[2242] β-(2-naphthyl)-L-alanine or β-(4,4′-biphenyl)alanine at position 18;
[2243] lysine, alanine, asparagine, glutamic acid, glycine, aspartic acid, histidine, threonine, or 2-aminoisobutyric acid at position 24;
[2244] tyrosine, 5-bromo-tryptophan, or L-beta-homotryptophan at position 25; and
[2245] leucine, glutamic acid, or α-aminoadipic acid at position 27.

[2246] E60. The polypeptide of E59, wherein the polypeptide further comprises d-serine, d-threonine, or 2-aminoisobutyric acid at position 2.

[2247] E61. The polypeptide of E59 or E60, wherein the polypeptide further comprises d-serine at position 2.

[2248] E62. The polypeptide of any one of E59-E61, wherein the polypeptide further comprises leucine, glutamic acid, or α-aminoadipic acid at position 27.

[2249] E63. The polypeptide of any one of E59-E62, wherein the polypeptide further comprises leucine at position 27.

[2250] E64. The polypeptide of any one of E53-E55, wherein the polypeptide comprises d-serine at position 2, 2-aminoisobutyric acid at position 16, leucine at position 27, and lysine at position 28.

[2251] E65. The polypeptide of any one of E53-E64, wherein the polypeptide further comprises lysine, citrulline, or glutamine at position 17.

[2252] E66. The polypeptide of E65, wherein the polypeptide further comprises lysine at position 17.

[2253] E67. The polypeptide of any one of E53-E55, wherein the polypeptide comprises d-serine at position 2, 2-aminoisobutyric acid at position 16, lysine at position 17, leucine at position 27, and lysine at position 28.

[2254] E68. The polypeptide of any one of E53-E64, wherein the polypeptide further comprises (3-(2-naphthyl)-L-alanine or β-(4,4′-biphenyl)alanine at position 18.

[2255] E69. The polypeptide of any one of E53-E64, wherein the polypeptide further comprises lysine, alanine, asparagine, glutamic acid, glycine, aspartic acid, histidine, threonine, or 2-aminoisobutyric acid at position 24.

[2256] E70. The polypeptide of E69, wherein the polypeptide further comprises lysine at position 24.

[2257] E71. The polypeptide of any one of E53-E55, wherein the polypeptide comprises d-serine at position 2, 2-aminoisobutyric acid at position 16, lysine, alanine, asparagine, glutamic acid, glycine, aspartic acid, histidine, threonine, or 2-aminoisobutyric acid at position 24, and lysine at position 28.

[2258] E72. The polypeptide of any one of E53-E55, wherein the polypeptide further comprises histidine at position 7.

[2259] E73. The polypeptide of any one of E53-E55, wherein the polypeptide further comprises tyrosine at position 1.

[2260] E74. The polypeptide of any one of E53-E55, wherein the polypeptide further comprises tyrosine, 5-bromo-tryptophan, or L-beta-homotryptophan at position 25.

[2261] E75. The polypeptide of any one of E53-E55, wherein the polypeptide comprises d-serine at position 2, 2-aminoisobutyric acid at position 16, tyrosine, 5-bromo-tryptophan, or L-beta-homotryptophan at position 25, leucine at position 27, and lysine at position 28.

[2262] E76. The polypeptide of any one of E53-E75, comprising at least 29 amino acids.

[2263] E77. The polypeptide of E76, wherein the polypeptide further comprises alanine, aspartic acid, glutamic acid, or serine at position 29.

[2264] E78. The polypeptide of E77, wherein the polypeptide comprises d-serine at position 2, 2-aminoisobutyric acid at position 16, lysine at position 28, and alanine, aspartic acid, glutamic acid, or serine at position 29.

[2265] E79. A polypeptide that agonizes a glucagon receptor (“GCGR”), wherein:
[2266] the polypeptide comprises at least 28 amino acids, wherein the polypeptide comprises 2-aminoisobutyric acid at position 16, leucine at position 27, and lysine at position 28; and
[2267] the polypeptide has at least 89% sequence identity to the amino acid sequence of SEQ ID NO: 1615.

[2268] E80. The polypeptide of E79, wherein the polypeptide has at least 93% sequence identity to the amino acid sequence of SEQ ID NO: 1615.

[2269] E81. The polypeptide of E79, wherein the polypeptide has at least 96% sequence identity to the amino acid sequence of SEQ ID NO: 1615.

[2270] E82. The polypeptide of any one of E79-E81, wherein the polypeptide further comprises d-serine at position 2.

[2271] E83. The polypeptide of any one of E79-E82, wherein the polypeptide further comprises aspartic acid or glutamic acid at position 24.

[2272] E84. The polypeptide of any one of E79-E83, wherein the polypeptide further comprises d-serine at position 2 and aspartic acid or glutamic acid at position 24.

[2273] E85. The polypeptide of any one of E79-E84, wherein the polypeptide further comprises d-serine at position 2 and aspartic acid at position 24.

[2274] E86. The polypeptide of any one of E79-E85, wherein the polypeptide further comprises lysine at position 17.

[2275] E87. The polypeptide of any one of E79-E86, wherein the polypeptide further comprises d-serine at position 2, lysine at position 17, and aspartic acid at position 24.

[2276] E88. A polypeptide that agonizes a glucagon receptor (“GCGR”), wherein:
[2277] the polypeptide comprises at least 28 amino acids, wherein the polypeptide comprises 2-aminoisobutyric acid at position 16, aspartic acid at position 24, and lysine at position 28; and
[2278] the polypeptide has at least 89% sequence identity to the amino acid sequence of SEQ ID NO: 1626.

[2279] E89. The polypeptide of E88, wherein the polypeptide has at least 93% sequence identity to the amino acid sequence of SEQ ID NO: 1626.

[2280] E90. The polypeptide of E88, wherein the polypeptide has at least 96% sequence identity to the amino acid sequence of SEQ ID NO: 1626.

[2281] E91. The polypeptide of any one of E88-E90, wherein the polypeptide further comprises d-serine at position 2.

[2282] E92. The polypeptide of any one of E88-E91, wherein the polypeptide further comprises lysine at position 17.

[2283] E93. The polypeptide of any one of E88-E92, wherein the polypeptide further comprises leucine at position 27.

[2284] E94. A polypeptide that agonizes a glucagon receptor (“GCGR”) comprising the amino acid sequence of any one of SEQ ID NOs: 1587-1627.

[2285] E95. The polypeptide of E94, wherein the polypeptide comprises the amino acid sequence of SEQ ID NO: 1596.

[2286] E96. The polypeptide of E94, wherein the polypeptide comprises the amino acid sequence of SEQ ID NO: 1597.

[2287] E97. The polypeptide of E94, wherein the polypeptide comprises the amino acid sequence of SEQ ID NO: 1615.

[2288] E98. The polypeptide of E94, wherein the polypeptide comprises the amino acid sequence of SEQ ID NO: 1626.

[2289] E99. The polypeptide of E94, wherein the polypeptide consists of the amino acid sequence of any one of SEQ ID NOs: 1587-1627.

[2290] E100. The polypeptide of E99, wherein the polypeptide consists of the amino acid sequence of SEQ ID NO: 1596.

[2291] E101. The polypeptide of E99, wherein the polypeptide consists of the amino acid sequence of SEQ ID NO: 1597.

[2292] E102. The polypeptide of E99, wherein the polypeptide consists of the amino acid sequence of SEQ ID NO: 1615.

[2293] E103. The polypeptide of E99, wherein the polypeptide consists of the amino acid sequence of SEQ ID NO: 1626.

[2294] E104. The polypeptide of any one of E1-E103, wherein the polypeptide agonizes human GCGR (“hGCGR”).

[2295] E105. The polypeptide of any one of E1-E104, wherein the polypeptide has a hGCGR EC₅₀ of less than or equal to 500 pM.

[2296] E106. The polypeptide of any one of E1-E105, wherein the polypeptide has a human glucagon-like peptide-1 receptor (“hGLP-1R”) EC₅₀:hGCGR EC₅₀ ratio of at least 40:1 (e.g., at least 50:1, at least 60:1, at least 70:1, at least 80:1, at least 90:1, at least 100:1, at least 250:1, at least 500:1, at least 1000:1).

[2297] E107. The polypeptide of any one of E1-E106, wherein the polypeptide has a hGLP-1R EC₅₀:hGCGR EC₅₀ ratio of at least 100:1.

[2298] E108. The polypeptide of any one of E1-E107, wherein the polypeptide has a hGLP-1R EC₅₀:hGCGR EC₅₀ ratio of at least 500:1.

[2299] E109. A molecule comprising:
[2300] a first polypeptide that agonizes a glucagon receptor (“GCGR”), wherein the first polypeptide is selected from the polypeptides of any one of E1-108; and
[2301] a second polypeptide comprising the amino acid sequence of any one of SEQ ID NOs: 1628-1683,
[2302] wherein the C-terminus of the second polypeptide is covalently linked to an ε-amino group of a lysine residue of the first polypeptide (e.g., an ε-amino group of a lysine residue of the first polypeptide has been condensed with a carboxyl group of the C-terminus of the second polypeptide to form an amide bond between the first polypeptide and the second polypeptide).

[2303] E110. The molecule of E109, wherein the C-terminus of the second polypeptide is covalently linked to the ε-amino group of a lysine at position 24 or position 28 of the first polypeptide (e.g., the ε-amino group of a lysine residue at position 24 or position 28 of the first polypeptide has been condensed with a carboxyl group of the C-terminus of the second polypeptide to form an amide bond between the first polypeptide and the second polypeptide).

[2304] E111. The molecule of E109 or E110, wherein the C-terminus of the second polypeptide is covalently linked to the ε-amino group of a lysine at position 24 of the first polypeptide.

[2305] E112. The molecule of E109 or E110, wherein the C-terminus of the second polypeptide is covalently linked to the ε-amino group of a lysine at position 28 of the first polypeptide.

[2306] E113. The molecule of any one of E109-E112, wherein the second polypeptide comprises the amino acid sequence of any one of SEQ ID NOs: 1628-1630.

[2307] E114. The molecule of any one of E109-E113, wherein the second polypeptide comprises the amino acid sequence of SEQ ID NO: 1628.

[2308] E115. The molecule of any one of E109-E113, wherein the second polypeptide comprises the amino acid sequence of SEQ ID NO: 1629.

[2309] E116. The molecule of any one of E109-E113, wherein the second polypeptide comprises the amino acid sequence of SEQ ID NO: 1630.

[2310] E117. The molecule of any one of E109-E113, wherein the first polypeptide comprises the amino acid sequence of any one of SEQ ID NOs: 1587-1627.

[2311] E118. The molecule of any one of E109-E117, wherein the first polypeptide comprises the amino acid sequence of any one of SEQ ID NOs: 1587, 1592, 1596, 1615, or 1626.

[2312] E119. The molecule of any one of E109-E118, wherein the first polypeptide comprises the amino acid sequence of SEQ ID NO: 1587.

[2313] E120. The molecule of any one of E109-E118, wherein the first polypeptide comprises the amino acid sequence of SEQ ID NO: 1592.

[2314] E121. The molecule of any one of E109-E118, wherein the first polypeptide comprises the amino acid sequence of SEQ ID NO: 1596.

[2315] E122. The molecule of any one of E109-E118, wherein the first polypeptide comprises the amino acid sequence of SEQ ID NO: 1615.

[2316] E123. The molecule of any one of E109-E118, wherein the first polypeptide comprises the amino acid sequence of SEQ ID NO: 1626.

[2317] E124. A molecule comprising:
[2318] a polypeptide that agonizes a glucagon receptor (“GCGR”), wherein the polypeptide is selected from the polypeptides of any one of E1-E108; and
[2319] a half-life extending domain (e.g., an Fc-containing polypeptide).

[2320] E125. The molecule of E124, wherein:
[2321] the half-life extending domain is an Fc-containing polypeptide;
   [2322] an ε-amino group of a lysine residue of the polypeptide is covalently linked to a C-terminus of a linker polypeptide; and
   [2323] an N-terminus of the linker polypeptide is conjugated to a cysteine residue of the Fc-containing polypeptide.

[2324] E126. The molecule of E125, wherein the linker polypeptide is a linear polypeptide.

[2325] E127. The molecule of E125 or E126, wherein the linker polypeptide comprises the amino acid sequence of any one of SEQ ID NOs: 1628-1683.

[2326] E128. The molecule of any one of E125-E127, wherein the linker polypeptide comprises the amino acid sequence of any one of SEQ ID NOs: 1628-1630.

[2327] E129. The molecule of any one of E125-E128, wherein the linker polypeptide comprises the amino acid sequence of SEQ ID NO: 1628.

[2328] E130. The molecule of any one of E125-E128, wherein the linker polypeptide comprises the amino acid sequence of SEQ ID NO: 1629.

[2329] E131. The molecule of any one of E125-E128, wherein the linker polypeptide comprises the amino acid sequence of SEQ ID NO: 1630.

[2330] E132. The molecule of any one of E124-E131, wherein the polypeptide comprises the amino acid sequence of any one of SEQ ID NOs: 1587-1627.

[2331] E133. The molecule of any one of E124-E132, wherein the polypeptide comprises the amino acid sequence of any one of SEQ ID NOs: 1588 or 1596-1611.

[2332] E134. The molecule of any one of E124-E132, wherein the polypeptide comprises the amino acid sequence of any one of SEQ ID NOs: 1587, 1592, 1596, 1615, or 1626.

[2333] E135. The molecule of any one of E124-E132, wherein the polypeptide comprises the amino acid sequence of SEQ ID NO: 1587.

[2334] E136. The molecule of any one of E124-E132, wherein the polypeptide comprises the amino acid sequence of SEQ ID NO: 1592.

[2335] E137. The molecule of any one of E124-E132, wherein the polypeptide comprises the amino acid sequence of SEQ ID NO: 1596.

[2336] E138. The molecule of any one of E124-E132, wherein the polypeptide comprises the amino acid sequence of SEQ ID NO: 1615.

[2337] E139. The molecule of any one of E124-E132, wherein the polypeptide comprises the amino acid sequence of SEQ ID NO: 1626.

[2338] E140. The molecule of any one of E124-E139, wherein the half-life extending domain is an antibody fragment.

[2339] E141. The molecule of any one of E124-E139, wherein the half-life extending domain is an antibody.

[2340] E142. The molecule of E140, wherein the antibody is of the IgG1-, IgG2-, or IgG4-subclass.

[2341] E143. The molecule of E140 or E141, wherein the antibody is of the IgG1- or IgG2-subclass.

[2342] E144. The molecule of any one of E141-E143, wherein the antibody specifically binds to 2,4-dinitrophenol (“DNP”).

[2343] E145. The molecule of any one of E141-E143, wherein the antibody specifically binds to a glucose-dependent insulinotropic polypeptide receptor (“GIPR”).

[2344] E146. The molecule of any one of E141-E143, wherein the antibody specifically binds to human GIPR.

[2345] E147. The molecule of E145 or E146, wherein the antibody inhibits binding of GIP to the extracellular portion of human GIPR.

[2346] E148. The molecule of E147, wherein the antibody comprises a CDRL1, a CDRL2, a CDRL3, a CDRH1, a CDRH2, and a CDRH3, wherein the CDRL1, the CDRL2, the CDRL3, the CDRH1, the CDRH2, and the CDRH3 comprise the amino acid sequences of SEQ ID NO: 702, SEQ ID NO: 859, SEQ ID NO: 1016, SEQ ID NO: 1173, SEQ ID NO: 1330, and SEQ ID NO: 1487, respectively.

[2347] E149. The molecule of E147 or E148, wherein the antibody comprises a light chain variable region comprising the amino acid sequence of SEQ ID NO: 74 and a heavy chain variable region comprising the amino acid sequence of SEQ ID NO: 231.

[2348] E150. The molecule of any one of E145-E149, wherein the antibody comprises a light chain comprising the amino acid sequence of SEQ ID NO: 388 and a heavy chain comprising the amino acid sequence of SEQ ID NO: 1571.

[2349] E151. A molecule comprising:
[2350] a first polypeptide that agonizes a glucagon receptor (“GCGR”); and
[2351] an antibody that specifically binds to a glucose-dependent insulinotropic polypeptide receptor (“GIPR”).

[2352] E152. The molecule of E151, wherein:
[2353] an ε-amino group of a lysine residue of the first polypeptide is covalently linked to a C-terminus of a first linker polypeptide; and
[2354] an N-terminus of the first linker polypeptide is conjugated to a cysteine residue of the antibody.

[2355] E153. The molecule of E151 or E152, wherein the first polypeptide is selected from the polypeptides of any one of E1-108.

[2356] E154. The molecule of any one of E151-E153, wherein the first polypeptide comprises the amino acid sequence of any one of SEQ ID NOs: 1587-1627.

[2357] E155. The molecule of any one of E151-E154, wherein the first polypeptide comprises the amino acid sequence of any one of SEQ ID NOs: 1587, 1592, 1596, 1615, or 1626.

[2358] E156. The molecule of any one of E151-E155, wherein the first polypeptide comprises the amino acid sequence of SEQ ID NO: 1587.

[2359] E157. The molecule of any one of E151-E155, wherein the first polypeptide comprises the amino acid sequence of SEQ ID NO: 1592.

[2360] E158. The molecule of any one of E151-E155, wherein the first polypeptide comprises the amino acid sequence of SEQ ID NO: 1596.

[2361] E159. The molecule of any one of E151-E155, wherein the first polypeptide comprises the amino acid sequence of SEQ ID NO: 1615.

[2362] E160. The molecule of any one of E151-E155, wherein the first polypeptide comprises the amino acid sequence of SEQ ID NO: 1626.

[2363] E161. The molecule of any one of E152-E160, wherein the first linker polypeptide is a linear polypeptide.

[2364] E162. The molecule of any one of E152-E161, wherein the first linker polypeptide comprises the amino acid sequence of any one of SEQ ID NOs: 1628-1683.

[2365] E163. The molecule of any one of E152-E162, wherein the first linker polypeptide comprises the amino acid sequence of any one of SEQ ID NOs: 1628-1630.

[2366] E164. The molecule of any one of E152-E163, wherein the first linker polypeptide comprises the amino acid sequence of SEQ ID NO: 1628.

[2367] E165. The molecule of any one of E152-E163, wherein the first linker polypeptide comprises the amino acid sequence of SEQ ID NO: 1629.

[2368] E166. The molecule of any one of E152-E163, wherein the first linker polypeptide comprises the amino acid sequence of SEQ ID NO: 1630.

[2369] E167. The molecule of any one of E152-E166, wherein the cysteine residue of the antibody that is conjugated to the N-terminus of the first linker polypeptide is at a position selected from the group consisting of 88 of a light chain, 384 of a heavy chain, and 487 of a heavy chain, according to AHo numbering.

[2370] E168. The molecule of E167, wherein the cysteine residue of the antibody that is conjugated to the N-terminus of the first linker polypeptide is at position 384 of a heavy chain, according to AHo numbering.

[2371] E169. The molecule of any one of E151-E168, further comprising a second polypeptide that agonizes a GCGR.

[2372] E170. The molecule of E169, wherein:
[2373] an ε-amino group of a lysine residue of the second polypeptide is covalently linked to a C-terminus of a second linker polypeptide; and
[2374] an N-terminus of the second linker polypeptide is conjugated to a cysteine residue of the antibody.

[2375] E171. The molecule of E169 or E170, wherein the second polypeptide is selected from the polypeptides of any one of E1-108.

[2376] E172. The molecule of any one of E169-E171, wherein the second polypeptide comprises the amino acid sequence of any one of SEQ ID NOs: 1587-1627.

[2377] E173. The molecule of any one of E169-E172, wherein the second polypeptide comprises the amino acid sequence of any one of SEQ ID NOs: 1587, 1592, 1596, 1615, or 1626.

[2378] E174. The molecule of any one of E169-E173, wherein the second polypeptide comprises the amino acid sequence of SEQ ID NO: 1587.

[2379] E175. The molecule of any one of E169-E173, wherein the second polypeptide comprises the amino acid sequence of SEQ ID NO: 1592.

[2380] E176. The molecule of any one of E169-E173, wherein the second polypeptide comprises the amino acid sequence of SEQ ID NO: 1596.

[2381] E177. The molecule of any one of E169-E173, wherein the second polypeptide comprises the amino acid sequence of SEQ ID NO: 1615.

[2382] E178. The molecule of any one of E169-E173, wherein the second polypeptide comprises the amino acid sequence of SEQ ID NO: 1626.

[2383] E179. The molecule of any one of E169-E178, wherein the first polypeptide has the same amino acid sequence as the second polypeptide.

[2384] E180. The molecule of any one of E170-E179, wherein the second linker polypeptide is a linear polypeptide.

[2385] E181. The molecule of any one of E170-E180, wherein the second linker polypeptide comprises the amino acid sequence of any one of SEQ ID NOs: 1628-1683.

[2386] E182. The molecule of any one of E170-E181, wherein the second linker polypeptide comprises the amino acid sequence of any one of SEQ ID NOs: 1628-1630.

[2387] E183. The molecule of any one of E170-E182, wherein the second linker polypeptide comprises the amino acid sequence of SEQ ID NO: 1628.

[2388] E184. The molecule of any one of E170-E182, wherein the second linker polypeptide comprises the amino acid sequence of SEQ ID NO: 1629.

[2389] E185. The molecule of any one of E170-E182, wherein the second linker polypeptide comprises the amino acid sequence of SEQ ID NO: 1630.

[2390] E186. The molecule of any one of E170-E185, wherein the first linker polypeptide has the same amino acid sequence as the second linker polypeptide.

[2391] E187. The molecule of any one of E170-E186, wherein the cysteine residue of the antibody that is conjugated to the N-terminus of the second linker polypeptide is at a position selected from the group consisting of 88 of a light chain, 384 of a heavy chain, and 487 of a heavy chain, according to AHo numbering.

[2392] E188. The molecule of E187, wherein the cysteine residue of the antibody that is conjugated to the N-terminus of the second linker polypeptide is at position 384 of a heavy chain, according to AHo numbering.

[2393] E189. The molecule of any one of E170-E187, wherein the cysteine residues of the antibody that are conjugated to the N-termini of the first linker polypeptide and the second linker polypeptide are at positions selected from the group consisting of 88 of both light chains, 384 of both heavy chains, and 487 of both heavy chains, according to AHo numbering.

[2394] E190. The molecule of E189, wherein the cysteine residues of the antibody that are conjugated to the N-termini of the first linker polypeptide and the second linker polypeptide are at positions 384 of both heavy chains, according to AHo numbering.

[2395] E191. The molecule of any one of E151-E190, wherein the antibody comprises a CDRL1, a CDRL2, a CDRL3, a CDRH1, a CDRH2, and a CDRH3, wherein the CDRL1, the CDRL2, the CDRL3, the CDRH1, the CDRH2, and the CDRH3 comprise amino acid sequences selected from:
[2396] i. SEQ ID NO: 629, SEQ ID NO: 786, SEQ ID NO: 943, SEQ ID NO: 1100, SEQ ID NO: 1257, and SEQ ID NO: 1414, respectively;
[2397] ii. SEQ ID NO: 630, SEQ ID NO: 787, SEQ ID NO: 944, SEQ ID NO: 1101, SEQ ID NO: 1258, and SEQ ID NO: 1415, respectively;
[2398] iii. SEQ ID NO: 631, SEQ ID NO: 788, SEQ ID NO: 945, SEQ ID NO: 1102, SEQ ID NO: 1259, and SEQ ID NO: 1416, respectively;
[2399] iv. SEQ ID NO: 632, SEQ ID NO: 789, SEQ ID NO: 946, SEQ ID NO: 1103, SEQ ID NO: 1260, and SEQ ID NO: 1417, respectively;
[2400] v. SEQ ID NO: 633, SEQ ID NO: 790, SEQ ID NO: 947, SEQ ID NO: 1104, SEQ ID NO: 1261, and SEQ ID NO: 1418, respectively;
[2401] vi. SEQ ID NO: 634, SEQ ID NO: 791, SEQ ID NO: 948, SEQ ID NO: 1105, SEQ ID NO: 1262, and SEQ ID NO: 1419, respectively;
[2402] vii. SEQ ID NO: 635, SEQ ID NO: 792, SEQ ID NO: 949, SEQ ID NO: 1106, SEQ ID NO: 1263, and SEQ ID NO: 1420, respectively;
[2403] viii. SEQ ID NO: 636, SEQ ID NO: 793, SEQ ID NO: 950, SEQ ID NO: 1107, SEQ ID NO: 1264, and SEQ ID NO: 1421, respectively;
[2404] ix. SEQ ID NO: 637, SEQ ID NO: 794, SEQ ID NO: 951, SEQ ID NO: 1108, SEQ ID NO: 1265, and SEQ ID NO: 1422, respectively;
[2405] x. SEQ ID NO: 638, SEQ ID NO: 795, SEQ ID NO: 952, SEQ ID NO: 1109, SEQ ID NO: 1266, and SEQ ID NO: 1423, respectively;
[2406] xi. SEQ ID NO: 639, SEQ ID NO: 796, SEQ ID NO: 953, SEQ ID NO: 1110, SEQ ID NO: 1267, and SEQ ID NO: 1424, respectively;
[2407] xii. SEQ ID NO: 640, SEQ ID NO: 797, SEQ ID NO: 954, SEQ ID NO: 1111, SEQ ID NO: 1268, and SEQ ID NO: 1425, respectively;
[2408] xiii. SEQ ID NO: 641, SEQ ID NO: 798, SEQ ID NO: 955, SEQ ID NO: 1112, SEQ ID NO: 1269, and SEQ ID NO: 1426, respectively;
[2409] xiv. SEQ ID NO: 642, SEQ ID NO: 799, SEQ ID NO: 956, SEQ ID NO: 1113, SEQ ID NO: 1270, and SEQ ID NO: 1427, respectively;
[2410] xv. SEQ ID NO: 643, SEQ ID NO: 800, SEQ ID NO: 957, SEQ ID NO: 1114, SEQ ID NO: 1271, and SEQ ID NO: 1428, respectively;
[2411] xvi. SEQ ID NO: 644, SEQ ID NO: 801, SEQ ID NO: 958, SEQ ID NO: 1115, SEQ ID NO: 1272, and SEQ ID NO: 1429, respectively;
[2412] xvii. SEQ ID NO: 645, SEQ ID NO: 802, SEQ ID NO: 959, SEQ ID NO: 1116, SEQ ID NO: 1273, and SEQ ID NO: 1430, respectively;
[2413] xviii. SEQ ID NO: 646, SEQ ID NO: 803, SEQ ID NO: 960, SEQ ID NO: 1117, SEQ ID NO: 1274, and SEQ ID NO: 1431, respectively;
[2414] xix. SEQ ID NO: 647, SEQ ID NO: 804, SEQ ID NO: 961, SEQ ID NO: 1118, SEQ ID NO: 1275, and SEQ ID NO: 1432, respectively;
[2415] xx. SEQ ID NO: 648, SEQ ID NO: 805, SEQ ID NO: 962, SEQ ID NO: 1119, SEQ ID NO: 1276, and SEQ ID NO: 1433, respectively;
[2416] xxi. SEQ ID NO: 649, SEQ ID NO: 806, SEQ ID NO: 963, SEQ ID NO: 1120, SEQ ID NO: 1277, and SEQ ID NO: 1434, respectively;
[2417] xxii. SEQ ID NO: 650, SEQ ID NO: 807, SEQ ID NO: 964, SEQ ID NO: 1121, SEQ ID NO: 1278, and SEQ ID NO: 1435, respectively;
[2418] xxiii. SEQ ID NO: 651, SEQ ID NO: 808, SEQ ID NO: 965, SEQ ID NO: 1122, SEQ ID NO: 1279, and SEQ ID NO: 1436, respectively;
[2419] xxiv. SEQ ID NO: 652, SEQ ID NO: 809, SEQ ID NO: 966, SEQ ID NO: 1123, SEQ ID NO: 1280, and SEQ ID NO: 1437, respectively;
[2420] xxv. SEQ ID NO: 653, SEQ ID NO: 810, SEQ ID NO: 967, SEQ ID NO: 1124, SEQ ID NO: 1281, and SEQ ID NO: 1438, respectively;
[2421] xxvi. SEQ ID NO: 654, SEQ ID NO: 811, SEQ ID NO: 968, SEQ ID NO: 1125, SEQ ID NO: 1282, and SEQ ID NO: 1439, respectively;
[2422] xxvii. SEQ ID NO: 655, SEQ ID NO: 812, SEQ ID NO: 969, SEQ ID NO: 1126, SEQ ID NO: 1283, and SEQ ID NO: 1440, respectively;
[2423] xxviii. SEQ ID NO: 656, SEQ ID NO: 813, SEQ ID NO: 970, SEQ ID NO: 1127, SEQ ID NO: 1284, and SEQ ID NO: 1441, respectively;
[2424] xxix. SEQ ID NO: 657, SEQ ID NO: 814, SEQ ID NO: 971, SEQ ID NO: 1128, SEQ ID NO: 1285, and SEQ ID NO: 1442, respectively;
[2425] xxx. SEQ ID NO: 658, SEQ ID NO: 815, SEQ ID NO: 972, SEQ ID NO: 1129, SEQ ID NO: 1286, and SEQ ID NO: 1443, respectively;
[2426] xxxi. SEQ ID NO: 659, SEQ ID NO: 816, SEQ ID NO: 973, SEQ ID NO: 1130, SEQ ID NO: 1287, and SEQ ID NO: 1444, respectively;
[2427] xxxii. SEQ ID NO: 660, SEQ ID NO: 817, SEQ ID NO: 974, SEQ ID NO: 1131, SEQ ID NO: 1288, and SEQ ID NO: 1445, respectively;
[2428] xxxiii. SEQ ID NO: 661, SEQ ID NO: 818, SEQ ID NO: 975, SEQ ID NO: 1132, SEQ ID NO: 1289, and SEQ ID NO: 1446, respectively;
[2429] xxxiv. SEQ ID NO: 662, SEQ ID NO: 819, SEQ ID NO: 976, SEQ ID NO: 1133, SEQ ID NO: 1290, and SEQ ID NO: 1447, respectively;
[2430] xxxv. SEQ ID NO: 663, SEQ ID NO: 820, SEQ ID NO: 977, SEQ ID NO: 1134, SEQ ID NO: 1291, and SEQ ID NO: 1448, respectively;
[2431] xxxvi. SEQ ID NO: 664, SEQ ID NO: 821, SEQ ID NO: 978, SEQ ID NO: 1135, SEQ ID NO: 1292, and SEQ ID NO: 1449, respectively;
[2432] xxxvii. SEQ ID NO: 665, SEQ ID NO: 822, SEQ ID NO: 979, SEQ ID NO: 1136, SEQ ID NO: 1293, and SEQ ID NO: 1450, respectively;
[2433] xxxviii. SEQ ID NO: 666, SEQ ID NO: 823, SEQ ID NO: 980, SEQ ID NO: 1137, SEQ ID NO: 1294, and SEQ ID NO: 1451, respectively;
[2434] xxxix. SEQ ID NO: 667, SEQ ID NO: 824, SEQ ID NO: 981, SEQ ID NO: 1138, SEQ ID NO: 1295, and SEQ ID NO: 1452, respectively;
[2435] xl. SEQ ID NO: 668, SEQ ID NO: 825, SEQ ID NO: 982, SEQ ID NO: 1139, SEQ ID NO: 1296, and SEQ ID NO: 1453, respectively;
[2436] xli. SEQ ID NO: 669, SEQ ID NO: 826, SEQ ID NO: 983, SEQ ID NO: 1140, SEQ ID NO: 1297, and SEQ ID NO: 1454, respectively;
[2437] xlii. SEQ ID NO: 670, SEQ ID NO: 827, SEQ ID NO: 984, SEQ ID NO: 1141, SEQ ID NO: 1298, and SEQ ID NO: 1455, respectively;
[2438] xliii. SEQ ID NO: 671, SEQ ID NO: 828, SEQ ID NO: 985, SEQ ID NO: 1142, SEQ ID NO: 1299, and SEQ ID NO: 1456, respectively;
[2439] xliv. SEQ ID NO: 672, SEQ ID NO: 829, SEQ ID NO: 986, SEQ ID NO: 1143, SEQ ID NO: 1300, and SEQ ID NO: 1457, respectively;
[2440] xlv. SEQ ID NO: 673, SEQ ID NO: 830, SEQ ID NO: 987, SEQ ID NO: 1144, SEQ ID NO: 1301, and SEQ ID NO: 1458, respectively;
[2441] xlvi. SEQ ID NO: 674, SEQ ID NO: 831, SEQ ID NO: 988, SEQ ID NO: 1145, SEQ ID NO: 1302, and SEQ ID NO: 1459, respectively;
[2442] xlvii. SEQ ID NO: 675, SEQ ID NO: 832, SEQ ID NO: 989, SEQ ID NO: 1146, SEQ ID NO: 1303, and SEQ ID NO: 1460, respectively;
[2443] xlviii. SEQ ID NO: 676, SEQ ID NO: 833, SEQ ID NO: 990, SEQ ID NO: 1147, SEQ ID NO: 1304, and SEQ ID NO: 1461, respectively;
[2444] xlix. SEQ ID NO: 677, SEQ ID NO: 834, SEQ ID NO: 991, SEQ ID NO: 1148, SEQ ID NO: 1305, and SEQ ID NO: 1462, respectively;
[2445] l. SEQ ID NO: 678, SEQ ID NO: 835, SEQ ID NO: 992, SEQ ID NO: 1149, SEQ ID NO: 1306, and SEQ ID NO: 1463, respectively;
[2446] li. SEQ ID NO: 679, SEQ ID NO: 836, SEQ ID NO: 993, SEQ ID NO: 1150, SEQ ID NO: 1307, and SEQ ID NO: 1464, respectively;
[2447] lii. SEQ ID NO: 680, SEQ ID NO: 837, SEQ ID NO: 994, SEQ ID NO: 1151, SEQ ID NO: 1308, and SEQ ID NO: 1465, respectively;
[2448] liii. SEQ ID NO: 681, SEQ ID NO: 838, SEQ ID NO: 995, SEQ ID NO: 1152, SEQ ID NO: 1309, and SEQ ID NO: 1466, respectively;
[2449] liv. SEQ ID NO: 682, SEQ ID NO: 839, SEQ ID NO: 996, SEQ ID NO: 1153, SEQ ID NO: 1310, and SEQ ID NO: 1467, respectively;
[2450] lv. SEQ ID NO: 683, SEQ ID NO: 840, SEQ ID NO: 997, SEQ ID NO: 1154, SEQ ID NO: 1311, and SEQ ID NO: 1468, respectively;
[2451] lvi. SEQ ID NO: 684, SEQ ID NO: 841, SEQ ID NO: 998, SEQ ID NO: 1155, SEQ ID NO: 1312, and SEQ ID NO: 1469, respectively;
[2452] lvii. SEQ ID NO: 685, SEQ ID NO: 842, SEQ ID NO: 999, SEQ ID NO: 1156, SEQ ID NO: 1313, and SEQ ID NO: 1470, respectively;
[2453] lviii. SEQ ID NO: 686, SEQ ID NO: 843, SEQ ID NO: 1000, SEQ ID NO: 1157, SEQ ID NO: 1314, and SEQ ID NO: 1471, respectively;
[2454] lix. SEQ ID NO: 687, SEQ ID NO: 844, SEQ ID NO: 1001, SEQ ID NO: 1158, SEQ ID NO: 1315, and SEQ ID NO: 1472, respectively;
[2455] lx. SEQ ID NO: 688, SEQ ID NO: 845, SEQ ID NO: 1002, SEQ ID NO: 1159, SEQ ID NO: 1316, and SEQ ID NO: 1473, respectively;
[2456] lxi. SEQ ID NO: 689, SEQ ID NO: 846, SEQ ID NO: 1003, SEQ ID NO: 1160, SEQ ID NO: 1317, and SEQ ID NO: 1474, respectively;
[2457] lxii. SEQ ID NO: 690, SEQ ID NO: 847, SEQ ID NO: 1004, SEQ ID NO: 1161, SEQ ID NO: 1318, and SEQ ID NO: 1475, respectively;
[2458] lxiii. SEQ ID NO: 691, SEQ ID NO: 848, SEQ ID NO: 1005, SEQ ID NO: 1162, SEQ ID NO: 1319, and SEQ ID NO: 1476, respectively;
[2459] lxiv. SEQ ID NO: 692, SEQ ID NO: 849, SEQ ID NO: 1006, SEQ ID NO: 1163, SEQ ID NO: 1320, and SEQ ID NO: 1477, respectively;
[2460] lxv. SEQ ID NO: 693, SEQ ID NO: 850, SEQ ID NO: 1007, SEQ ID NO: 1164, SEQ ID NO: 1321, and SEQ ID NO: 1478, respectively;
[2461] lxvi. SEQ ID NO: 694, SEQ ID NO: 851, SEQ ID NO: 1008, SEQ ID NO: 1165, SEQ ID NO: 1322, and SEQ ID NO: 1479, respectively;
[2462] lxvii. SEQ ID NO: 695, SEQ ID NO: 852, SEQ ID NO: 1009, SEQ ID NO: 1166, SEQ ID NO: 1323, and SEQ ID NO: 1480, respectively;
[2463] lxviii. SEQ ID NO: 696, SEQ ID NO: 853, SEQ ID NO: 1010, SEQ ID NO: 1167, SEQ ID NO: 1324, and SEQ ID NO: 1481, respectively;
[2464] lxix. SEQ ID NO: 697, SEQ ID NO: 854, SEQ ID NO: 1011, SEQ ID NO: 1168, SEQ ID NO: 1325, and SEQ ID NO: 1482, respectively;
[2465] lxx. SEQ ID NO: 698, SEQ ID NO: 855, SEQ ID NO: 1012, SEQ ID NO: 1169, SEQ ID NO: 1326, and SEQ ID NO: 1483, respectively;
[2466] lxxi. SEQ ID NO: 699, SEQ ID NO: 856, SEQ ID NO: 1013, SEQ ID NO: 1170, SEQ ID NO: 1327, and SEQ ID NO: 1484, respectively;
[2467] lxxii. SEQ ID NO: 700, SEQ ID NO: 857, SEQ ID NO: 1014, SEQ ID NO: 1171, SEQ ID NO: 1328, and SEQ ID NO: 1485, respectively;
[2468] lxxiii. SEQ ID NO: 701, SEQ ID NO: 858, SEQ ID NO: 1015, SEQ ID NO: 1172, SEQ ID NO: 1329, and SEQ ID NO: 1486, respectively;
[2469] lxxiv. SEQ ID NO: 702, SEQ ID NO: 859, SEQ ID NO: 1016, SEQ ID NO: 1173, SEQ ID NO: 1330, and SEQ ID NO: 1487, respectively;
[2470] lxxv. SEQ ID NO: 703, SEQ ID NO: 860, SEQ ID NO: 1017, SEQ ID NO: 1174, SEQ ID NO: 1331, and SEQ ID NO: 1488, respectively;
[2471] lxxvi. SEQ ID NO: 704, SEQ ID NO: 861, SEQ ID NO: 1018, SEQ ID NO: 1175, SEQ ID NO: 1332, and SEQ ID NO: 1489, respectively;
[2472] lxxvii. SEQ ID NO: 705, SEQ ID NO: 862, SEQ ID NO: 1019, SEQ ID NO: 1176, SEQ ID NO: 1333, and SEQ ID NO: 1490, respectively;
[2473] lxxviii. SEQ ID NO: 706, SEQ ID NO: 863, SEQ ID NO: 1020, SEQ ID NO: 1177, SEQ ID NO: 1334, and SEQ ID NO: 1491, respectively;
[2474] lxxix. SEQ ID NO: 707, SEQ ID NO: 864, SEQ ID NO: 1021, SEQ ID NO: 1178, SEQ ID NO: 1335, and SEQ ID NO: 1492, respectively;
[2475] lxxx. SEQ ID NO: 708, SEQ ID NO: 865, SEQ ID NO: 1022, SEQ ID NO: 1179, SEQ ID NO: 1336, and SEQ ID NO: 1493, respectively;
[2476] lxxxi. SEQ ID NO: 709, SEQ ID NO: 866, SEQ ID NO: 1023, SEQ ID NO: 1180, SEQ ID NO: 1337, and SEQ ID NO: 1494, respectively;
[2477] lxxxii. SEQ ID NO: 710, SEQ ID NO: 867, SEQ ID NO: 1024, SEQ ID NO: 1181, SEQ ID NO: 1338, and SEQ ID NO: 1495, respectively;
[2478] lxxxiii. SEQ ID NO: 711, SEQ ID NO: 868, SEQ ID NO: 1025, SEQ ID NO: 1182, SEQ ID NO: 1339, and SEQ ID NO: 1496, respectively;
[2479] lxxxiv. SEQ ID NO: 712, SEQ ID NO: 869, SEQ ID NO: 1026, SEQ ID NO: 1183, SEQ ID NO: 1340, and SEQ ID NO: 1497, respectively;
[2480] lxxxv. SEQ ID NO: 713, SEQ ID NO: 870, SEQ ID NO: 1027, SEQ ID NO: 1184, SEQ ID NO: 1341, and SEQ ID NO: 1498, respectively;
[2481] lxxxvi. SEQ ID NO: 714, SEQ ID NO: 871, SEQ ID NO: 1028, SEQ ID NO: 1185, SEQ ID NO: 1342, and SEQ ID NO: 1499, respectively;
[2482] lxxxvii. SEQ ID NO: 715, SEQ ID NO: 872, SEQ ID NO: 1029, SEQ ID NO: 1186, SEQ ID NO: 1343, and SEQ ID NO: 1500, respectively;
[2483] lxxxviii. SEQ ID NO: 716, SEQ ID NO: 873, SEQ ID NO: 1030, SEQ ID NO: 1187, SEQ ID NO: 1344, and SEQ ID NO: 1501, respectively;
[2484] lxxxix. SEQ ID NO: 717, SEQ ID NO: 874, SEQ ID NO: 1031, SEQ ID NO: 1188, SEQ ID NO: 1345, and SEQ ID NO: 1502, respectively;
[2485] xc. SEQ ID NO: 718, SEQ ID NO: 875, SEQ ID NO: 1032, SEQ ID NO: 1189, SEQ ID NO: 1346, and SEQ ID NO: 1503, respectively;
[2486] xci. SEQ ID NO: 719, SEQ ID NO: 876, SEQ ID NO: 1033, SEQ ID NO: 1190, SEQ ID NO: 1347, and SEQ ID NO: 1504, respectively;
[2487] xcii. SEQ ID NO: 720, SEQ ID NO: 877, SEQ ID NO: 1034, SEQ ID NO: 1191, SEQ ID NO: 1348, and SEQ ID NO: 1505, respectively;
[2488] xciii. SEQ ID NO: 721, SEQ ID NO: 878, SEQ ID NO: 1035, SEQ ID NO: 1192, SEQ ID NO: 1349, and SEQ ID NO: 1506, respectively;
[2489] xciv. SEQ ID NO: 722, SEQ ID NO: 879, SEQ ID NO: 1036, SEQ ID NO: 1193, SEQ ID NO: 1350, and SEQ ID NO: 1507, respectively;
[2490] xcv. SEQ ID NO: 723, SEQ ID NO: 880, SEQ ID NO: 1037, SEQ ID NO: 1194, SEQ ID NO: 1351, and SEQ ID NO: 1508, respectively;
[2491] xcvi. SEQ ID NO: 724, SEQ ID NO: 881, SEQ ID NO: 1038, SEQ ID NO: 1195, SEQ ID NO: 1352, and SEQ ID NO: 1509, respectively;
[2492] xcvii. SEQ ID NO: 725, SEQ ID NO: 882, SEQ ID NO: 1039, SEQ ID NO: 1196, SEQ ID NO: 1353, and SEQ ID NO: 1510, respectively;
[2493] xcviii. SEQ ID NO: 726, SEQ ID NO: 883, SEQ ID NO: 1040, SEQ ID NO: 1197, SEQ ID NO: 1354, and SEQ ID NO: 1511, respectively;
[2494] xcix. SEQ ID NO: 727, SEQ ID NO: 884, SEQ ID NO: 1041, SEQ ID NO: 1198, SEQ ID NO: 1355, and SEQ ID NO: 1512, respectively;
[2495] c. SEQ ID NO: 728, SEQ ID NO: 885, SEQ ID NO: 1042, SEQ ID NO: 1199, SEQ ID NO: 1356, and SEQ ID NO: 1513, respectively;
[2496] ci. SEQ ID NO: 729, SEQ ID NO: 886, SEQ ID NO: 1043, SEQ ID NO: 1200, SEQ ID NO: 1357, and SEQ ID NO: 1514, respectively;
[2497] cii. SEQ ID NO: 730, SEQ ID NO: 887, SEQ ID NO: 1044, SEQ ID NO: 1201, SEQ ID NO: 1358, and SEQ ID NO: 1515, respectively;
[2498] ciii. SEQ ID NO: 731, SEQ ID NO: 888, SEQ ID NO: 1045, SEQ ID NO: 1202, SEQ ID NO: 1359, and SEQ ID NO: 1516, respectively;
[2499] civ. SEQ ID NO: 732, SEQ ID NO: 889, SEQ ID NO: 1046, SEQ ID NO: 1203, SEQ ID NO: 1360, and SEQ ID NO: 1517, respectively;
[2500] cv. SEQ ID NO: 733, SEQ ID NO: 890, SEQ ID NO: 1047, SEQ ID NO: 1204, SEQ ID NO: 1361, and SEQ ID NO: 1518, respectively;
[2501] cvi. SEQ ID NO: 734, SEQ ID NO: 891, SEQ ID NO: 1048, SEQ ID NO: 1205, SEQ ID NO: 1362, and SEQ ID NO: 1519, respectively;
[2502] cvii. SEQ ID NO: 735, SEQ ID NO: 892, SEQ ID NO: 1049, SEQ ID NO: 1206, SEQ ID NO: 1363, and SEQ ID NO: 1520, respectively;
[2503] cviii. SEQ ID NO: 736, SEQ ID NO: 893, SEQ ID NO: 1050, SEQ ID NO: 1207, SEQ ID NO: 1364, and SEQ ID NO: 1521, respectively;
[2504] cix. SEQ ID NO: 737, SEQ ID NO: 894, SEQ ID NO: 1051, SEQ ID NO: 1208, SEQ ID NO: 1365, and SEQ ID NO: 1522, respectively;
[2505] cx. SEQ ID NO: 738, SEQ ID NO: 895, SEQ ID NO: 1052, SEQ ID NO: 1209, SEQ ID NO: 1366, and SEQ ID NO: 1523, respectively;
[2506] cxi. SEQ ID NO: 739, SEQ ID NO: 896, SEQ ID NO: 1053, SEQ ID NO: 1210, SEQ ID NO: 1367, and SEQ ID NO: 1524, respectively;
[2507] cxii. SEQ ID NO: 740, SEQ ID NO: 897, SEQ ID NO: 1054, SEQ ID NO: 1211, SEQ ID NO: 1368, and SEQ ID NO: 1525, respectively;
[2508] cxiii. SEQ ID NO: 741, SEQ ID NO: 898, SEQ ID NO: 1055, SEQ ID NO: 1212, SEQ ID NO: 1369, and SEQ ID NO: 1526, respectively;
[2509] cxiv. SEQ ID NO: 742, SEQ ID NO: 899, SEQ ID NO: 1056, SEQ ID NO: 1213, SEQ ID NO: 1370, and SEQ ID NO: 1527, respectively;
[2510] cxv. SEQ ID NO: 743, SEQ ID NO: 900, SEQ ID NO: 1057, SEQ ID NO: 1214, SEQ ID NO: 1371, and SEQ ID NO: 1528, respectively;
[2511] cxvi. SEQ ID NO: 744, SEQ ID NO: 901, SEQ ID NO: 1058, SEQ ID NO: 1215, SEQ ID NO: 1372, and SEQ ID NO: 1529, respectively;
[2512] cxvii. SEQ ID NO: 745, SEQ ID NO: 902, SEQ ID NO: 1059, SEQ ID NO: 1216, SEQ ID NO: 1373, and SEQ ID NO: 1530, respectively;
[2513] cxviii. SEQ ID NO: 746, SEQ ID NO: 903, SEQ ID NO: 1060, SEQ ID NO: 1217, SEQ ID NO: 1374, and SEQ ID NO: 1531, respectively;
[2514] cxix. SEQ ID NO: 747, SEQ ID NO: 904, SEQ ID NO: 1061, SEQ ID NO: 1218, SEQ ID NO: 1375, and SEQ ID NO: 1532, respectively;
[2515] cxx. SEQ ID NO: 748, SEQ ID NO: 905, SEQ ID NO: 1062, SEQ ID NO: 1219, SEQ ID NO: 1376, and SEQ ID NO: 1533, respectively;
[2516] cxxi. SEQ ID NO: 749, SEQ ID NO: 906, SEQ ID NO: 1063, SEQ ID NO: 1220, SEQ ID NO: 1377, and SEQ ID NO: 1534, respectively;
[2517] cxxii. SEQ ID NO: 750, SEQ ID NO: 907, SEQ ID NO: 1064, SEQ ID NO: 1221, SEQ ID NO: 1378, and SEQ ID NO: 1535, respectively;
[2518] cxxiii. SEQ ID NO: 751, SEQ ID NO: 908, SEQ ID NO: 1065, SEQ ID NO: 1222, SEQ ID NO: 1379, and SEQ ID NO: 1536, respectively;
[2519] cxxiv. SEQ ID NO: 752, SEQ ID NO: 909, SEQ ID NO: 1066, SEQ ID NO: 1223, SEQ ID NO: 1380, and SEQ ID NO: 1537, respectively;
[2520] cxxv. SEQ ID NO: 753, SEQ ID NO: 910, SEQ ID NO: 1067, SEQ ID NO: 1224, SEQ ID NO: 1381, and SEQ ID NO: 1538, respectively;
[2521] cxxvi. SEQ ID NO: 754, SEQ ID NO: 911, SEQ ID NO: 1068, SEQ ID NO: 1225, SEQ ID NO: 1382, and SEQ ID NO: 1539, respectively;
[2522] cxxvii. SEQ ID NO: 755, SEQ ID NO: 912, SEQ ID NO: 1069, SEQ ID NO: 1226, SEQ ID NO: 1383, and SEQ ID NO: 1540, respectively;
[2523] cxxviii. SEQ ID NO: 756, SEQ ID NO: 913, SEQ ID NO: 1070, SEQ ID NO: 1227, SEQ ID NO: 1384, and SEQ ID NO: 1541, respectively;
[2524] cxxix. SEQ ID NO: 757, SEQ ID NO: 914, SEQ ID NO: 1071, SEQ ID NO: 1228, SEQ ID NO: 1385, and SEQ ID NO: 1542, respectively;
[2525] cxxx. SEQ ID NO: 758, SEQ ID NO: 915, SEQ ID NO: 1072, SEQ ID NO: 1229, SEQ ID NO: 1386, and SEQ ID NO: 1543, respectively;
[2526] cxxxi. SEQ ID NO: 759, SEQ ID NO: 916, SEQ ID NO: 1073, SEQ ID NO: 1230, SEQ ID NO: 1387, and SEQ ID NO: 1544, respectively;
[2527] cxxxii. SEQ ID NO: 760, SEQ ID NO: 917, SEQ ID NO: 1074, SEQ ID NO: 1231, SEQ ID NO: 1388, and SEQ ID NO: 1545, respectively;
[2528] cxxxiii. SEQ ID NO: 761, SEQ ID NO: 918, SEQ ID NO: 1075, SEQ ID NO: 1232, SEQ ID NO: 1389, and SEQ ID NO: 1546, respectively;
[2529] cxxxiv. SEQ ID NO: 762, SEQ ID NO: 919, SEQ ID NO: 1076, SEQ ID NO: 1233, SEQ ID NO: 1390, and SEQ ID NO: 1547, respectively;
[2530] cxxxv. SEQ ID NO: 763, SEQ ID NO: 920, SEQ ID NO: 1077, SEQ ID NO: 1234, SEQ ID NO: 1391, and SEQ ID NO: 1548, respectively;
[2531] cxxxvi. SEQ ID NO: 764, SEQ ID NO: 921, SEQ ID NO: 1078, SEQ ID NO: 1235, SEQ ID NO: 1392, and SEQ ID NO: 1549, respectively;
[2532] cxxxvii. SEQ ID NO: 765, SEQ ID NO: 922, SEQ ID NO: 1079, SEQ ID NO: 1236, SEQ ID NO: 1393, and SEQ ID NO: 1550, respectively;
[2533] cxxxviii. SEQ ID NO: 766, SEQ ID NO: 923, SEQ ID NO: 1080, SEQ ID NO: 1237, SEQ ID NO: 1394, and SEQ ID NO: 1551, respectively;
[2534] cxxxix. SEQ ID NO: 767, SEQ ID NO: 924, SEQ ID NO: 1081, SEQ ID NO: 1238, SEQ ID NO: 1395, and SEQ ID NO: 1552, respectively;
[2535] cxl. SEQ ID NO: 768, SEQ ID NO: 925, SEQ ID NO: 1082, SEQ ID NO: 1239, SEQ ID NO: 1396, and SEQ ID NO: 1553, respectively;
[2536] cxli. SEQ ID NO: 769, SEQ ID NO: 926, SEQ ID NO: 1083, SEQ ID NO: 1240, SEQ ID NO: 1397, and SEQ ID NO: 1554, respectively;
[2537] cxlii. SEQ ID NO: 770, SEQ ID NO: 927, SEQ ID NO: 1084, SEQ ID NO: 1241, SEQ ID NO: 1398, and SEQ ID NO: 1555, respectively;
[2538] cxliii. SEQ ID NO: 771, SEQ ID NO: 928, SEQ ID NO: 1085, SEQ ID NO: 1242, SEQ ID NO: 1399, and SEQ ID NO: 1556, respectively;
[2539] cxliv. SEQ ID NO: 772, SEQ ID NO: 929, SEQ ID NO: 1086, SEQ ID NO: 1243, SEQ ID NO: 1400, and SEQ ID NO: 1557, respectively;
[2540] cxlv. SEQ ID NO: 773, SEQ ID NO: 930, SEQ ID NO: 1087, SEQ ID NO: 1244, SEQ ID NO: 1401, and SEQ ID NO: 1558, respectively;
[2541] cxlvi. SEQ ID NO: 774, SEQ ID NO: 931, SEQ ID NO: 1088, SEQ ID NO: 1245, SEQ ID NO: 1402, and SEQ ID NO: 1559, respectively;
[2542] cxlvii. SEQ ID NO: 775, SEQ ID NO: 932, SEQ ID NO: 1089, SEQ ID NO: 1246, SEQ ID NO: 1403, and SEQ ID NO: 1560, respectively;
[2543] cxlviii. SEQ ID NO: 776, SEQ ID NO: 933, SEQ ID NO: 1090, SEQ ID NO: 1247, SEQ ID NO: 1404, and SEQ ID NO: 1561, respectively;
[2544] cxlix. SEQ ID NO: 777, SEQ ID NO: 934, SEQ ID NO: 1091, SEQ ID NO: 1248, SEQ ID NO: 1405, and SEQ ID NO: 1562, respectively;
[2545] cl. SEQ ID NO: 778, SEQ ID NO: 935, SEQ ID NO: 1092, SEQ ID NO: 1249, SEQ ID NO: 1406, and SEQ ID NO: 1563, respectively;
[2546] cli. SEQ ID NO: 779, SEQ ID NO: 936, SEQ ID NO: 1093, SEQ ID NO: 1250, SEQ ID NO: 1407, and SEQ ID NO: 1564, respectively;
[2547] clii. SEQ ID NO: 780, SEQ ID NO: 937, SEQ ID NO: 1094, SEQ ID NO: 1251, SEQ ID NO: 1408, and SEQ ID NO: 1565, respectively;
[2548] cliii. SEQ ID NO: 781, SEQ ID NO: 938, SEQ ID NO: 1095, SEQ ID NO: 1252, SEQ ID NO: 1409, and SEQ ID NO: 1566, respectively;
[2549] cliv. SEQ ID NO: 782, SEQ ID NO: 939, SEQ ID NO: 1096, SEQ ID NO: 1253, SEQ ID NO: 1410, and SEQ ID NO: 1567, respectively;
[2550] clv. SEQ ID NO: 783, SEQ ID NO: 940, SEQ ID NO: 1097, SEQ ID NO: 1254, SEQ ID NO: 1411, and SEQ ID NO: 1568, respectively;
[2551] clvi. SEQ ID NO: 784, SEQ ID NO: 941, SEQ ID NO: 1098, SEQ ID NO: 1255, SEQ ID NO: 1412, and SEQ ID NO: 1569, respectively; and
[2552] clvii. SEQ ID NO: 785, SEQ ID NO: 942, SEQ ID NO: 1099, SEQ ID NO: 1256, SEQ ID NO: 1413, and SEQ ID NO: 1570, respectively,
[2553] preferably wherein the CDRL1, the CDRL2, the CDRL3, the CDRH1, the CDRH2, and the CDRH3 comprise the amino acid sequences of SEQ ID NO: 702, SEQ ID NO: 859, SEQ ID NO: 1016, SEQ ID NO: 1173, SEQ ID NO: 1330, and SEQ ID NO: 1487, respectively.

[2554] E192. The molecule of any one of E151-E191, wherein the antibody comprises a light chain variable region and a heavy chain variable region, wherein the light chain variable region and the heavy chain variable region comprise amino acid sequences selected from:
[2555] i. SEQ ID NO: 1 and SEQ ID NO: 158, respectively;
[2556] ii. SEQ ID NO: 2 and SEQ ID NO: 159, respectively;
[2557] iii. SEQ ID NO: 3 and SEQ ID NO: 160, respectively;
[2558] iv. SEQ ID NO: 4 and SEQ ID NO: 161, respectively;
[2559] v. SEQ ID NO: 5 and SEQ ID NO: 162, respectively;
[2560] vi. SEQ ID NO: 6 and SEQ ID NO: 163, respectively;
[2561] vii. SEQ ID NO: 7 and SEQ ID NO: 164, respectively;
[2562] viii. SEQ ID NO: 8 and SEQ ID NO: 165, respectively;
[2563] ix. SEQ ID NO: 9 and SEQ ID NO: 166, respectively;
[2564] x. SEQ ID NO: 10 and SEQ ID NO: 167, respectively;
[2565] xi. SEQ ID NO: 11 and SEQ ID NO: 168, respectively;
[2566] xii. SEQ ID NO: 12 and SEQ ID NO: 169, respectively;
[2567] xiii. SEQ ID NO: 13 and SEQ ID NO: 170, respectively;
[2568] xiv. SEQ ID NO: 14 and SEQ ID NO: 171, respectively;
[2569] xv. SEQ ID NO: 15 and SEQ ID NO: 172, respectively;
[2570] xvi. SEQ ID NO: 16 and SEQ ID NO: 173, respectively;
[2571] xvii. SEQ ID NO: 17 and SEQ ID NO: 174, respectively;
[2572] xviii. SEQ ID NO: 18 and SEQ ID NO: 175, respectively;
[2573] xix. SEQ ID NO: 19 and SEQ ID NO: 176, respectively;
[2574] xx. SEQ ID NO: 20 and SEQ ID NO: 177, respectively;
[2575] xxi. SEQ ID NO: 21 and SEQ ID NO: 178, respectively;
[2576] xxii. SEQ ID NO: 22 and SEQ ID NO: 179, respectively;
[2577] xxiii. SEQ ID NO: 23 and SEQ ID NO: 180, respectively;
[2578] xxiv. SEQ ID NO: 24 and SEQ ID NO: 181, respectively;
[2579] xxv. SEQ ID NO: 25 and SEQ ID NO: 182, respectively;
[2580] xxvi. SEQ ID NO: 26 and SEQ ID NO: 183, respectively;
[2581] xxvii. SEQ ID NO: 27 and SEQ ID NO: 184, respectively;
[2582] xxviii. SEQ ID NO: 28 and SEQ ID NO: 185, respectively;
[2583] xxix. SEQ ID NO: 29 and SEQ ID NO: 186, respectively;
[2584] xxx. SEQ ID NO: 30 and SEQ ID NO: 187, respectively;
[2585] xxxi. SEQ ID NO: 31 and SEQ ID NO: 188, respectively;
[2586] xxxii. SEQ ID NO: 32 and SEQ ID NO: 189, respectively;
[2587] xxxiii. SEQ ID NO: 33 and SEQ ID NO: 190, respectively;
[2588] xxxiv. SEQ ID NO: 34 and SEQ ID NO: 191, respectively;
[2589] xxxv. SEQ ID NO: 35 and SEQ ID NO: 192, respectively;
[2590] xxxvi. SEQ ID NO: 36 and SEQ ID NO: 193, respectively;
[2591] xxxvii. SEQ ID NO: 37 and SEQ ID NO: 194, respectively;
[2592] xxxviii. SEQ ID NO: 38 and SEQ ID NO: 195, respectively;
[2593] xxxix. SEQ ID NO: 39 and SEQ ID NO: 196, respectively;
[2594] xl. SEQ ID NO: 40 and SEQ ID NO: 197, respectively;
[2595] xli. SEQ ID NO: 41 and SEQ ID NO: 198, respectively;
[2596] xlii. SEQ ID NO: 42 and SEQ ID NO: 199, respectively;
[2597] xliii. SEQ ID NO: 43 and SEQ ID NO: 200, respectively;
[2598] xliv. SEQ ID NO: 44 and SEQ ID NO: 201, respectively;
[2599] xlv. SEQ ID NO: 45 and SEQ ID NO: 202, respectively;
[2600] xlvi. SEQ ID NO: 46 and SEQ ID NO: 203, respectively;
[2601] xlvii. SEQ ID NO: 47 and SEQ ID NO: 204, respectively;
[2602] xlviii. SEQ ID NO: 48 and SEQ ID NO: 205, respectively;
[2603] xlix. SEQ ID NO: 49 and SEQ ID NO: 206, respectively;
[2604] l. SEQ ID NO: 50 and SEQ ID NO: 207, respectively;
[2605] li. SEQ ID NO: 51 and SEQ ID NO: 208, respectively;
[2606] lii. SEQ ID NO: 52 and SEQ ID NO: 209, respectively;
[2607] liii. SEQ ID NO: 53 and SEQ ID NO: 210, respectively;
[2608] liv. SEQ ID NO: 54 and SEQ ID NO: 211, respectively;
[2609] lv. SEQ ID NO: 55 and SEQ ID NO: 212, respectively;
[2610] lvi. SEQ ID NO: 56 and SEQ ID NO: 213, respectively;
[2611] lvii. SEQ ID NO: 57 and SEQ ID NO: 214, respectively;
[2612] lviii. SEQ ID NO: 58 and SEQ ID NO: 215, respectively;
[2613] lix. SEQ ID NO: 59 and SEQ ID NO: 216, respectively;
[2614] lx. SEQ ID NO: 60 and SEQ ID NO: 217, respectively;
[2615] lxi. SEQ ID NO: 61 and SEQ ID NO: 218, respectively;
[2616] lxii. SEQ ID NO: 62 and SEQ ID NO: 219, respectively;
[2617] lxiii. SEQ ID NO: 63 and SEQ ID NO: 220, respectively;
[2618] lxiv. SEQ ID NO: 64 and SEQ ID NO: 221, respectively;
[2619] lxv. SEQ ID NO: 65 and SEQ ID NO: 222, respectively;
[2620] lxvi. SEQ ID NO: 66 and SEQ ID NO: 223, respectively;
[2621] lxvii. SEQ ID NO: 67 and SEQ ID NO: 224, respectively;
[2622] lxviii. SEQ ID NO: 68 and SEQ ID NO: 225, respectively;
[2623] lxix. SEQ ID NO: 69 and SEQ ID NO: 226, respectively;
[2624] lxx. SEQ ID NO: 70 and SEQ ID NO: 227, respectively;
[2625] lxxi. SEQ ID NO: 71 and SEQ ID NO: 228, respectively;
[2626] lxxii. SEQ ID NO: 72 and SEQ ID NO: 229, respectively;
[2627] lxxiii. SEQ ID NO: 73 and SEQ ID NO: 230, respectively;
[2628] lxxiv. SEQ ID NO: 74 and SEQ ID NO: 231, respectively;
[2629] lxxv. SEQ ID NO: 75 and SEQ ID NO: 232, respectively;
[2630] lxxvi. SEQ ID NO: 76 and SEQ ID NO: 233, respectively;
[2631] lxxvii. SEQ ID NO: 77 and SEQ ID NO: 234, respectively;
[2632] lxxviii. SEQ ID NO: 78 and SEQ ID NO: 235, respectively;
[2633] lxxix. SEQ ID NO: 79 and SEQ ID NO: 236, respectively;
[2634] lxxx. SEQ ID NO: 80 and SEQ ID NO: 237, respectively;
[2635] lxxxi. SEQ ID NO: 81 and SEQ ID NO: 238, respectively;
[2636] lxxxii. SEQ ID NO: 82 and SEQ ID NO: 239, respectively;
[2637] lxxxiii. SEQ ID NO: 83 and SEQ ID NO: 240, respectively;
[2638] lxxxiv. SEQ ID NO: 84 and SEQ ID NO: 241, respectively;
[2639] lxxxv. SEQ ID NO: 85 and SEQ ID NO: 242, respectively;
[2640] lxxxvi. SEQ ID NO: 86 and SEQ ID NO: 243, respectively;
[2641] lxxxvii. SEQ ID NO: 87 and SEQ ID NO: 244, respectively;
[2642] lxxxviii. SEQ ID NO: 88 and SEQ ID NO: 245, respectively;
[2643] lxxxix. SEQ ID NO: 89 and SEQ ID NO: 246, respectively;
[2644] xc. SEQ ID NO: 90 and SEQ ID NO: 247, respectively;
[2645] xci. SEQ ID NO: 91 and SEQ ID NO: 248, respectively;
[2646] xcii. SEQ ID NO: 92 and SEQ ID NO: 249, respectively;
[2647] xciii. SEQ ID NO: 93 and SEQ ID NO: 250, respectively;
[2648] xciv. SEQ ID NO: 94 and SEQ ID NO: 251, respectively;
[2649] xcv. SEQ ID NO: 95 and SEQ ID NO: 252, respectively;
[2650] xcvi. SEQ ID NO: 96 and SEQ ID NO: 253, respectively;
[2651] xcvii. SEQ ID NO: 97 and SEQ ID NO: 254, respectively;
[2652] xcviii. SEQ ID NO: 98 and SEQ ID NO: 255, respectively;
[2653] xcix. SEQ ID NO: 99 and SEQ ID NO: 256, respectively;
[2654] c. SEQ ID NO: 100 and SEQ ID NO: 257, respectively;
[2655] ci. SEQ ID NO: 101 and SEQ ID NO: 258, respectively;
[2656] cii. SEQ ID NO: 102 and SEQ ID NO: 259, respectively;
[2657] ciii. SEQ ID NO: 103 and SEQ ID NO: 260, respectively;
[2658] civ. SEQ ID NO: 104 and SEQ ID NO: 261, respectively;
[2659] cv. SEQ ID NO: 105 and SEQ ID NO: 262, respectively;
[2660] cvi. SEQ ID NO: 106 and SEQ ID NO: 263, respectively;
[2661] cvii. SEQ ID NO: 107 and SEQ ID NO: 264, respectively;
[2662] cviii. SEQ ID NO: 108 and SEQ ID NO: 265, respectively;
[2663] cix. SEQ ID NO: 109 and SEQ ID NO: 266, respectively;
[2664] cx. SEQ ID NO: 110 and SEQ ID NO: 267, respectively;
[2665] cxi. SEQ ID NO: 111 and SEQ ID NO: 268, respectively;
[2666] cxii. SEQ ID NO: 112 and SEQ ID NO: 269, respectively;
[2667] cxiii. SEQ ID NO: 113 and SEQ ID NO: 270, respectively;
[2668] cxiv. SEQ ID NO: 114 and SEQ ID NO: 271, respectively;
[2669] cxv. SEQ ID NO: 115 and SEQ ID NO: 272, respectively;
[2670] cxvi. SEQ ID NO: 116 and SEQ ID NO: 273, respectively;
[2671] cxvii. SEQ ID NO: 117 and SEQ ID NO: 274, respectively;
[2672] cxviii. SEQ ID NO: 118 and SEQ ID NO: 275, respectively;
[2673] cxix. SEQ ID NO: 119 and SEQ ID NO: 276, respectively;
[2674] cxx. SEQ ID NO: 120 and SEQ ID NO: 277, respectively;
[2675] cxxi. SEQ ID NO: 121 and SEQ ID NO: 278, respectively;
[2676] cxxii. SEQ ID NO: 122 and SEQ ID NO: 279, respectively;
[2677] cxxiii. SEQ ID NO: 123 and SEQ ID NO: 280, respectively;
[2678] cxxiv. SEQ ID NO: 124 and SEQ ID NO: 281, respectively;
[2679] cxxv. SEQ ID NO: 125 and SEQ ID NO: 282, respectively;
[2680] cxxvi. SEQ ID NO: 126 and SEQ ID NO: 283, respectively;
[2681] cxxvii. SEQ ID NO: 127 and SEQ ID NO: 284, respectively;
[2682] cxxviii. SEQ ID NO: 128 and SEQ ID NO: 285, respectively;
[2683] cxxix. SEQ ID NO: 129 and SEQ ID NO: 286, respectively;
[2684] cxxx. SEQ ID NO: 130 and SEQ ID NO: 287, respectively;
[2685] cxxxi. SEQ ID NO: 131 and SEQ ID NO: 288, respectively;
[2686] cxxxii. SEQ ID NO: 132 and SEQ ID NO: 289, respectively;
[2687] cxxxiii. SEQ ID NO: 133 and SEQ ID NO: 290, respectively;
[2688] cxxxiv. SEQ ID NO: 134 and SEQ ID NO: 291, respectively;
[2689] cxxxv. SEQ ID NO: 135 and SEQ ID NO: 292, respectively;
[2690] cxxxvi. SEQ ID NO: 136 and SEQ ID NO: 293, respectively;
[2691] cxxxvii. SEQ ID NO: 137 and SEQ ID NO: 294, respectively;
[2692] cxxxviii. SEQ ID NO: 138 and SEQ ID NO: 295, respectively;
[2693] cxxxix. SEQ ID NO: 139 and SEQ ID NO: 296, respectively;
[2694] cxl. SEQ ID NO: 140 and SEQ ID NO: 297, respectively;
[2695] cxli. SEQ ID NO: 141 and SEQ ID NO: 298, respectively;
[2696] cxlii. SEQ ID NO: 142 and SEQ ID NO: 299, respectively;
[2697] cxliii. SEQ ID NO: 143 and SEQ ID NO: 300, respectively;
[2698] cxliv. SEQ ID NO: 144 and SEQ ID NO: 301, respectively;
[2699] cxlv. SEQ ID NO: 145 and SEQ ID NO: 302, respectively;
[2700] cxlvi. SEQ ID NO: 146 and SEQ ID NO: 303, respectively;
[2701] cxlvii. SEQ ID NO: 147 and SEQ ID NO: 304, respectively;
[2702] cxlviii. SEQ ID NO: 148 and SEQ ID NO: 305, respectively;
[2703] cxlix. SEQ ID NO: 149 and SEQ ID NO: 306, respectively;
[2704] cl. SEQ ID NO: 150 and SEQ ID NO: 307, respectively;
[2705] cli. SEQ ID NO: 151 and SEQ ID NO: 308, respectively;
[2706] clii. SEQ ID NO: 152 and SEQ ID NO: 309, respectively;
[2707] cliii. SEQ ID NO: 153 and SEQ ID NO: 310, respectively;
[2708] cliv. SEQ ID NO: 154 and SEQ ID NO: 311, respectively;
[2709] clv. SEQ ID NO: 155 and SEQ ID NO: 312, respectively;
[2710] clvi. SEQ ID NO: 156 and SEQ ID NO: 313, respectively; and
[2711] clvii. SEQ ID NO: 157 and SEQ ID NO: 314, respectively,
[2712] preferably wherein the light chain variable region and the heavy chain variable region comprise the amino acid sequences of SEQ ID NO: 74 and SEQ ID NO: 231, respectively.

[2713] E193. The molecule of anyone of E151-167, E169-E187, E188, E189, E191, or E192, wherein the antibody comprises a light chain and a heavy chain, wherein the light chain and heavy chain comprise amino acid sequences selected from:
[2714] i. SEQ ID NO: 315 and SEQ ID NO: 472, respectively;
[2715] ii. SEQ ID NO: 316 and SEQ ID NO: 473, respectively;
[2716] iii. SEQ ID NO: 317 and SEQ ID NO: 474, respectively;
[2717] iv. SEQ ID NO: 318 and SEQ ID NO: 475, respectively;
[2718] v. SEQ ID NO: 319 and SEQ ID NO: 476, respectively;
[2719] vi. SEQ ID NO: 320 and SEQ ID NO: 477, respectively;
[2720] vii. SEQ ID NO: 321 and SEQ ID NO: 478, respectively;
[2721] viii. SEQ ID NO: 322 and SEQ ID NO: 479, respectively;
[2722] ix. SEQ ID NO: 323 and SEQ ID NO: 480, respectively;
[2723] x. SEQ ID NO: 324 and SEQ ID NO: 481, respectively;
[2724] xi. SEQ ID NO: 325 and SEQ ID NO: 482, respectively;
[2725] xii. SEQ ID NO: 326 and SEQ ID NO: 483, respectively;
[2726] xiii. SEQ ID NO: 327 and SEQ ID NO: 484, respectively;
[2727] xiv. SEQ ID NO: 328 and SEQ ID NO: 485, respectively;
[2728] xv. SEQ ID NO: 329 and SEQ ID NO: 486, respectively;
[2729] xvi. SEQ ID NO: 330 and SEQ ID NO: 487, respectively;
[2730] xvii. SEQ ID NO: 331 and SEQ ID NO: 488, respectively;
[2731] xviii. SEQ ID NO: 332 and SEQ ID NO: 489, respectively;
[2732] xix. SEQ ID NO: 333 and SEQ ID NO: 490, respectively;
[2733] xx. SEQ ID NO: 334 and SEQ ID NO: 491, respectively;
[2734] xxi. SEQ ID NO: 335 and SEQ ID NO: 492, respectively;
[2735] xxii. SEQ ID NO: 336 and SEQ ID NO: 493, respectively;
[2736] xxiii. SEQ ID NO: 337 and SEQ ID NO: 494, respectively;
[2737] xxiv. SEQ ID NO: 338 and SEQ ID NO: 495, respectively;
[2738] xxv. SEQ ID NO: 339 and SEQ ID NO: 496, respectively;
[2739] xxvi. SEQ ID NO: 340 and SEQ ID NO: 497, respectively;
[2740] xxvii. SEQ ID NO: 341 and SEQ ID NO: 498, respectively;
[2741] xxviii. SEQ ID NO: 342 and SEQ ID NO: 499, respectively;
[2742] xxix. SEQ ID NO: 343 and SEQ ID NO: 500, respectively;
[2743] xxx. SEQ ID NO: 344 and SEQ ID NO: 501, respectively;
[2744] xxxi. SEQ ID NO: 345 and SEQ ID NO: 502, respectively;
[2745] xxxii. SEQ ID NO: 346 and SEQ ID NO: 503, respectively;
[2746] xxxiii. SEQ ID NO: 347 and SEQ ID NO: 504, respectively;
[2747] xxxiv. SEQ ID NO: 348 and SEQ ID NO: 505, respectively;
[2748] xxxv. SEQ ID NO: 349 and SEQ ID NO: 506, respectively;
[2749] xxxvi. SEQ ID NO: 350 and SEQ ID NO: 507, respectively;
[2750] xxxvii. SEQ ID NO: 351 and SEQ ID NO: 508, respectively;
[2751] xxxviii. SEQ ID NO: 352 and SEQ ID NO: 509, respectively;
[2752] xxxix. SEQ ID NO: 353 and SEQ ID NO: 510, respectively;
[2753] xl. SEQ ID NO: 354 and SEQ ID NO: 511, respectively;
[2754] xli. SEQ ID NO: 355 and SEQ ID NO: 512, respectively;
[2755] xlii. SEQ ID NO: 356 and SEQ ID NO: 513, respectively;
[2756] xliii. SEQ ID NO: 357 and SEQ ID NO: 514, respectively;
[2757] xliv. SEQ ID NO: 358 and SEQ ID NO: 515, respectively;
[2758] xlv. SEQ ID NO: 359 and SEQ ID NO: 516, respectively;
[2759] xlvi. SEQ ID NO: 360 and SEQ ID NO: 517, respectively;
[2760] xlvii. SEQ ID NO: 361 and SEQ ID NO: 518, respectively;
[2761] xlviii. SEQ ID NO: 362 and SEQ ID NO: 519, respectively;
[2762] xlix. SEQ ID NO: 363 and SEQ ID NO: 520, respectively;
[2763] l. SEQ ID NO: 364 and SEQ ID NO: 521, respectively;
[2764] li. SEQ ID NO: 365 and SEQ ID NO: 522, respectively;
[2765] lii. SEQ ID NO: 366 and SEQ ID NO: 523, respectively;
[2766] liii. SEQ ID NO: 367 and SEQ ID NO: 524, respectively;
[2767] liv. SEQ ID NO: 368 and SEQ ID NO: 525, respectively;
[2768] lv. SEQ ID NO: 369 and SEQ ID NO: 526, respectively;
[2769] lvi. SEQ ID NO: 370 and SEQ ID NO: 527, respectively;
[2770] lvii. SEQ ID NO: 371 and SEQ ID NO: 528, respectively;
[2771] lviii. SEQ ID NO: 372 and SEQ ID NO: 529, respectively;
[2772] lix. SEQ ID NO: 373 and SEQ ID NO: 530, respectively;
[2773] lx. SEQ ID NO: 374 and SEQ ID NO: 531, respectively;
[2774] lxi. SEQ ID NO: 375 and SEQ ID NO: 532, respectively;
[2775] lxii. SEQ ID NO: 376 and SEQ ID NO: 533, respectively;
[2776] lxiii. SEQ ID NO: 377 and SEQ ID NO: 534, respectively;
[2777] lxiv. SEQ ID NO: 378 and SEQ ID NO: 535, respectively;
[2778] lxv. SEQ ID NO: 379 and SEQ ID NO: 536, respectively;
[2779] lxvi. SEQ ID NO: 380 and SEQ ID NO: 537, respectively;
[2780] lxvii. SEQ ID NO: 381 and SEQ ID NO: 538, respectively;
[2781] lxviii. SEQ ID NO: 382 and SEQ ID NO: 539, respectively;
[2782] lxix. SEQ ID NO: 383 and SEQ ID NO: 540, respectively;
[2783] lxx. SEQ ID NO: 384 and SEQ ID NO: 541, respectively;
[2784] lxxi. SEQ ID NO: 385 and SEQ ID NO: 542, respectively;
[2785] lxxii. SEQ ID NO: 386 and SEQ ID NO: 543, respectively;
[2786] lxxiii. SEQ ID NO: 387 and SEQ ID NO: 544, respectively;
[2787] lxxiv. SEQ ID NO: 388 and SEQ ID NO: 545, respectively;
[2788] lxxv. SEQ ID NO: 389 and SEQ ID NO: 546, respectively;
[2789] lxxvi. SEQ ID NO: 390 and SEQ ID NO: 547, respectively;
[2790] lxxvii. SEQ ID NO: 391 and SEQ ID NO: 548, respectively;
[2791] lxxviii. SEQ ID NO: 392 and SEQ ID NO: 549, respectively;
[2792] lxxix. SEQ ID NO: 393 and SEQ ID NO: 550, respectively;
[2793] lxxx. SEQ ID NO: 394 and SEQ ID NO: 551, respectively;
[2794] lxxxi. SEQ ID NO: 395 and SEQ ID NO: 552, respectively;
[2795] lxxxii. SEQ ID NO: 396 and SEQ ID NO: 553, respectively;
[2796] lxxxiii. SEQ ID NO: 397 and SEQ ID NO: 554, respectively;
[2797] lxxxiv. SEQ ID NO: 398 and SEQ ID NO: 555, respectively;
[2798] lxxxv. SEQ ID NO: 399 and SEQ ID NO: 556, respectively;
[2799] lxxxvi. SEQ ID NO: 400 and SEQ ID NO: 557, respectively;
[2800] lxxxvii. SEQ ID NO: 401 and SEQ ID NO: 558, respectively;
[2801] lxxxviii. SEQ ID NO: 402 and SEQ ID NO: 559, respectively;
[2802] lxxxix. SEQ ID NO: 403 and SEQ ID NO: 560, respectively;
[2803] xc. SEQ ID NO: 404 and SEQ ID NO: 561, respectively;
[2804] xci. SEQ ID NO: 405 and SEQ ID NO: 562, respectively;
[2805] xcii. SEQ ID NO: 406 and SEQ ID NO: 563, respectively;
[2806] xciii. SEQ ID NO: 407 and SEQ ID NO: 564, respectively;
[2807] xciv. SEQ ID NO: 408 and SEQ ID NO: 565, respectively;
[2808] xcv. SEQ ID NO: 409 and SEQ ID NO: 566, respectively;
[2809] xcvi. SEQ ID NO: 410 and SEQ ID NO: 567, respectively;
[2810] xcvii. SEQ ID NO: 411 and SEQ ID NO: 568, respectively;
[2811] xcviii. SEQ ID NO: 412 and SEQ ID NO: 569, respectively;
[2812] xcix. SEQ ID NO: 413 and SEQ ID NO: 570, respectively;
[2813] c. SEQ ID NO: 414 and SEQ ID NO: 571, respectively;
[2814] ci. SEQ ID NO: 415 and SEQ ID NO: 572, respectively;
[2815] cii. SEQ ID NO: 416 and SEQ ID NO: 573, respectively;
[2816] ciii. SEQ ID NO: 417 and SEQ ID NO: 574, respectively;
[2817] civ. SEQ ID NO: 418 and SEQ ID NO: 575, respectively;
[2818] cv. SEQ ID NO: 419 and SEQ ID NO: 576, respectively;
[2819] cvi. SEQ ID NO: 420 and SEQ ID NO: 577, respectively;
[2820] cvii. SEQ ID NO: 421 and SEQ ID NO: 578, respectively;
[2821] cviii. SEQ ID NO: 422 and SEQ ID NO: 579, respectively;
[2822] cix. SEQ ID NO: 423 and SEQ ID NO: 580, respectively;
[2823] cx. SEQ ID NO: 424 and SEQ ID NO: 581, respectively;
[2824] cxi. SEQ ID NO: 425 and SEQ ID NO: 582, respectively;
[2825] cxii. SEQ ID NO: 426 and SEQ ID NO: 583, respectively;
[2826] cxiii. SEQ ID NO: 427 and SEQ ID NO: 584, respectively;
[2827] cxiv. SEQ ID NO: 428 and SEQ ID NO: 585, respectively;
[2828] cxv. SEQ ID NO: 429 and SEQ ID NO: 586, respectively;
[2829] cxvi. SEQ ID NO: 430 and SEQ ID NO: 587, respectively;
[2830] cxvii. SEQ ID NO: 431 and SEQ ID NO: 588, respectively;
[2831] cxviii. SEQ ID NO: 432 and SEQ ID NO: 589, respectively;
[2832] cxix. SEQ ID NO: 433 and SEQ ID NO: 590, respectively;
[2833] cxx. SEQ ID NO: 434 and SEQ ID NO: 591, respectively;
[2834] cxxi. SEQ ID NO: 435 and SEQ ID NO: 592, respectively;
[2835] cxxii. SEQ ID NO: 436 and SEQ ID NO: 593, respectively;
[2836] cxxiii. SEQ ID NO: 437 and SEQ ID NO: 594, respectively;
[2837] cxxiv. SEQ ID NO: 438 and SEQ ID NO: 595, respectively;
[2838] cxxv. SEQ ID NO: 439 and SEQ ID NO: 596, respectively;
[2839] cxxvi. SEQ ID NO: 440 and SEQ ID NO: 597, respectively;
[2840] cxxvii. SEQ ID NO: 441 and SEQ ID NO: 598, respectively;
[2841] cxxviii. SEQ ID NO: 442 and SEQ ID NO: 599, respectively;
[2842] cxxix. SEQ ID NO: 443 and SEQ ID NO: 600, respectively;
[2843] cxxx. SEQ ID NO: 444 and SEQ ID NO: 601, respectively;
[2844] cxxxi. SEQ ID NO: 445 and SEQ ID NO: 602, respectively;
[2845] cxxxii. SEQ ID NO: 446 and SEQ ID NO: 603, respectively;
[2846] cxxxiii. SEQ ID NO: 447 and SEQ ID NO: 604, respectively;
[2847] cxxxiv. SEQ ID NO: 448 and SEQ ID NO: 605, respectively;
[2848] cxxxv. SEQ ID NO: 449 and SEQ ID NO: 606, respectively;
[2849] cxxxvi. SEQ ID NO: 450 and SEQ ID NO: 607, respectively;
[2850] cxxxvii. SEQ ID NO: 451 and SEQ ID NO: 608, respectively;
[2851] cxxxviii. SEQ ID NO: 452 and SEQ ID NO: 609, respectively;
[2852] cxxxix. SEQ ID NO: 453 and SEQ ID NO: 610, respectively;
[2853] cxl. SEQ ID NO: 454 and SEQ ID NO: 611, respectively;
[2854] cxli. SEQ ID NO: 455 and SEQ ID NO: 612, respectively;
[2855] cxlii. SEQ ID NO: 456 and SEQ ID NO: 613, respectively;
[2856] cxliii. SEQ ID NO: 457 and SEQ ID NO: 614, respectively;
[2857] cxliv. SEQ ID NO: 458 and SEQ ID NO: 615, respectively;
[2858] cxlv. SEQ ID NO: 459 and SEQ ID NO: 616, respectively;
[2859] cxlvi. SEQ ID NO: 460 and SEQ ID NO: 617, respectively;
[2860] cxlvii. SEQ ID NO: 461 and SEQ ID NO: 618, respectively;
[2861] cxlviii. SEQ ID NO: 462 and SEQ ID NO: 619, respectively;
[2862] cxlix. SEQ ID NO: 463 and SEQ ID NO: 620, respectively;
[2863] cl. SEQ ID NO: 464 and SEQ ID NO: 621, respectively;
[2864] cli. SEQ ID NO: 465 and SEQ ID NO: 622, respectively;
[2865] clii. SEQ ID NO: 466 and SEQ ID NO: 623, respectively;
[2866] cliii. SEQ ID NO: 467 and SEQ ID NO: 624, respectively;
[2867] cliv. SEQ ID NO: 468 and SEQ ID NO: 625, respectively;
[2868] clv. SEQ ID NO: 469 and SEQ ID NO: 626, respectively;
[2869] clvi. SEQ ID NO: 470 and SEQ ID NO: 627, respectively; and
[2870] clvii. SEQ ID NO: 471 and SEQ ID NO: 628, respectively,
[2871] wherein the antibody comprises one or more cysteine amino acid substitution(s) at one or more position(s) selected from 88 of the light chain, 384 of the heavy chain, or 487 of the heavy chain, according to AHo numbering.

[2872] E194. The molecule of E193, wherein:
[2873] the light chain comprises the amino acid sequence of SEQ ID NO: 388 and the heavy chain comprises the amino acid sequence of SEQ ID NO: 1571; or
[2874] the light chain comprises the amino acid sequence of SEQ ID NO: 455 and the heavy chain comprises the amino acid sequence of SEQ ID NO: 1572; or
[2875] the light chain comprises the amino acid sequence of SEQ ID NO: 389 and the heavy chain comprises the amino acid sequence of SEQ ID NO: 1573; or
[2876] the light chain comprises the amino acid sequence of SEQ ID NO: 455 and the heavy chain comprises the amino acid sequence of SEQ ID NO: 1574; or
[2877] the light chain comprises the amino acid sequence of SEQ ID NO: 1575 and the heavy chain comprises the amino acid sequence of SEQ ID NO: 612,
[2878] preferably wherein the light chain comprises the amino acid sequence of SEQ ID NO: 388 and the heavy chain comprises the amino acid sequence of SEQ ID NO: 1571.

[2879] E195. A molecule comprising:
[2880] a first polypeptide that agonizes a glucagon receptor (“GCGR”);
[2881] a first linker polypeptide;
[2882] an antibody that specifically binds to a glucose-dependent insulinotropic polypeptide receptor (“GIPR”);
[2883] a second linker polypeptide; and
[2884] a second polypeptide that agonizes a GCGR,
[2885] wherein:
   [2886] an ε-amino group of a lysine residue of the first polypeptide is covalently linked to a C-terminus of the first linker polypeptide;
   [2887] an N-terminus of the first linker polypeptide is conjugated to a cysteine residue of the antibody;
   [2888] an ε-amino group of a lysine residue of the second polypeptide is covalently linked to a C-terminus of the second linker polypeptide; and
   [2889] an N-terminus of the second linker polypeptide is conjugated to a cysteine residue of the antibody.

[2890] E196. The molecule of E195, wherein the first linker polypeptide and the second linker polypeptide independently comprise amino acid sequences selected from SEQ ID NOs: 1628-1683, preferably SEQ ID NOs: 1628-1630, preferably SEQ ID NO: 1630.

[2891] E197. The molecule of E195 or E196, wherein the first polypeptide and the second polypeptide independently comprise amino acid sequences selected from SEQ ID NOs: 1587, 1592, 1596, 1615, and 1626.

[2892] E198. The molecule of any one of E195-E197, wherein the first polypeptide has the same amino acid sequence as the second polypeptide.

[2893] E199. The molecule of any one of E195-E198, wherein the first linker polypeptide has the same amino acid sequence as the second linker polypeptide.

[2894] E200. The molecule of any one of E195-E199, wherein:
[2895] the first polypeptide has the same amino acid sequence as the second polypeptide; and
[2896] the first linker polypeptide has the same amino acid sequence as the second linker polypeptide.

[2897] E201. The molecule of any one of E195-E200, wherein the lysine residue of the first polypeptide comprising the ε-amino group that is covalently linked to the C-terminus of the first linker polypeptide is at position 24 or position 28.

[2898] E202. The molecule of any one of E195-E201, wherein the lysine residue of the second polypeptide comprising the ε-amino group that is covalently linked to the C-terminus of the second linker polypeptide is at position 24 or position 28.

[2899] E203. The molecule of any one of E195-E202, wherein:
[2900] the lysine residue of the first polypeptide comprising the ε-amino group that is covalently linked to the C-terminus of the first linker polypeptide is at position 28; and
[2901] the lysine residue of the second polypeptide comprising the ε-amino group that is covalently linked to the C-terminus of the second linker polypeptide is at position 28.

[2902] E204. The molecule of any one of E195-E203, wherein the cysteine residues of the antibody that are conjugated to the N-termini of the first linker polypeptide and the second linker polypeptide are at positions selected from the group consisting of 88 of both light chains, 384 of both heavy chains, and 487 of both heavy chains, according to AHo numbering.

[2903] E205. The molecule of E204, wherein the cysteine residues of the antibody that are conjugated to the N-termini of the first linker polypeptide and the second linker polypeptide are at positions 384 of both heavy chains, according to AHo numbering.

[2904] E206. The molecule of any one of E195-E205, wherein:
[2905] the lysine residue of the first polypeptide comprising the ε-amino group that is covalently linked to the C-terminus of the first linker polypeptide is at position 28;
[2906] the lysine residue of the second polypeptide comprising the ε-amino group that is covalently linked to the C-terminus of the second linker polypeptide is at position 28; and
[2907] the cysteine residues of the antibody that are conjugated to the N-termini of the first linker polypeptide and the second linker polypeptide are at positions 384 of both heavy chains, according to AHo numbering.

[2908] E207. The molecule of any one of E195-E206, wherein the antibody comprises a CDRL1, a CDRL2, a CDRL3, a CDRH1, a CDRH2, and a CDRH3, wherein the CDRL1, the CDRL2, the CDRL3, the CDRH1, the CDRH2, and the CDRH3 comprise the amino acid sequences of SEQ ID NO: 702, SEQ ID NO: 859, SEQ ID NO: 1016, SEQ ID NO: 1173, SEQ ID NO: 1330, and SEQ ID NO: 1487, respectively.

[2909] E208. The molecule of any one of E195-E207, wherein the antibody comprises a light chain variable region comprising the amino acid sequence of SEQ ID NO: 74 and a heavy chain variable region comprising the amino acid sequence of SEQ ID NO: 231.

[2910] E209. The molecule of any one of E195-E208, wherein the antibody comprises a light chain comprising the amino acid sequence of SEQ ID NO: 388 and a heavy chain comprising the amino acid sequence of SEQ ID NO: 1571.

[2911] E210. A molecule comprising:
[2912] a polypeptide that agonizes a glucagon receptor (“GCGR”) comprising the amino acid sequence of SEQ ID NO: 1615;
[2913] a linker polypeptide comprising the amino acid sequence of SEQ ID NO: 1629; and
[2914] an antibody that specifically binds to a glucose-dependent insulinotropic polypeptide receptor (“GIPR”), wherein the antibody comprises a light chain and a heavy chain, wherein the light chain comprises the amino acid sequence of SEQ ID NO: 388 and the heavy chain comprises the amino acid sequence of SEQ ID NO: 1571,
[2915] wherein:
   [2916] an ε-amino group of a lysine residue at position 28 of the polypeptide is covalently linked to a C-terminus of the linker polypeptide; and
   [2917] an N-terminus of the linker polypeptide is conjugated to a cysteine residue at position 275 of the heavy chain of the antibody.

[2918] E211. A molecule comprising:
[2919] a polypeptide that agonizes a glucagon receptor (“GCGR”) comprising the amino acid sequence of SEQ ID NO: 1626;
[2920] a linker polypeptide comprising the amino acid sequence of SEQ ID NO: 1628; and
[2921] an antibody that specifically binds to a glucose-dependent insulinotropic polypeptide receptor (“GIPR”), wherein the antibody comprises a light chain and a heavy chain, wherein the light chain comprises the amino acid sequence of SEQ ID NO: 388 and the heavy chain comprises the amino acid sequence of SEQ ID NO: 1571,
[2922] wherein:
   [2923] an ε-amino group of a lysine residue at position 28 of the polypeptide is covalently linked to a C-terminus of the linker polypeptide; and
   [2924] an N-terminus of the linker polypeptide is conjugated to a cysteine residue at position 275 of the heavy chain of the antibody.

[2925] E212. A molecule comprising:
[2926] a polypeptide that agonizes a glucagon receptor (“GCGR”) comprising the amino acid sequence of SEQ ID NO: 1592;
[2927] a linker polypeptide comprising the amino acid sequence of SEQ ID NO: 1628; and
[2928] an antibody that specifically binds to a glucose-dependent insulinotropic polypeptide receptor (“GIPR”), wherein the antibody comprises a light chain and a heavy chain, wherein the light chain comprises the amino acid sequence of SEQ ID NO: 388 and the heavy chain comprises the amino acid sequence of SEQ ID NO: 1571,
[2929] wherein:
   [2930] an ε-amino group of a lysine residue at position 24 of the polypeptide is covalently linked to a C-terminus of the linker polypeptide; and
   [2931] an N-terminus of the linker polypeptide is conjugated to a cysteine residue at position 275 of the heavy chain of the antibody.

[2932] E213. A molecule comprising:
[2933] a polypeptide that agonizes a glucagon receptor (“GCGR”) comprising the amino acid sequence of SEQ ID NO: 1626;
[2934] a linker polypeptide comprising the amino acid sequence of SEQ ID NO: 1629; and
[2935] an antibody that specifically binds to a glucose-dependent insulinotropic polypeptide receptor (“GIPR”), wherein the antibody comprises a light chain and a heavy chain, wherein the light chain comprises the amino acid sequence of SEQ ID NO: 388 and the heavy chain comprises the amino acid sequence of SEQ ID NO: 1571,
[2936] wherein:
   [2937] an ε-amino group of a lysine residue at position 28 of the polypeptide is covalently linked to a C-terminus of the linker polypeptide; and
   [2938] an N-terminus of the linker polypeptide is conjugated to a cysteine residue at position 275 of the heavy chain of the antibody.

[2939] E214. A molecule comprising:
[2940] a polypeptide that agonizes a glucagon receptor (“GCGR”) comprising the amino acid sequence of SEQ ID NO: 1587;
[2941] a linker polypeptide comprising the amino acid sequence of SEQ ID NO: 1628; and
[2942] an antibody that specifically binds to a glucose-dependent insulinotropic polypeptide receptor (“GIPR”), wherein the antibody comprises a light chain and a heavy chain, wherein the light chain comprises the amino acid sequence of SEQ ID NO: 388 and the heavy chain comprises the amino acid sequence of SEQ ID NO: 1571,
[2943] wherein:
   [2944] an ε-amino group of a lysine residue at position 28 of the polypeptide is covalently linked to a C-terminus of the linker polypeptide; and
   [2945] an N-terminus of the linker polypeptide is conjugated to a cysteine residue at position 275 of the heavy chain of the antibody.

[2946] E215. A molecule comprising:
[2947] a polypeptide that agonizes a glucagon receptor (“GCGR”) comprising the amino acid sequence of SEQ ID NO: 1587;
[2948] a linker polypeptide comprising the amino acid sequence of SEQ ID NO: 1630; and
[2949] an antibody that specifically binds to a glucose-dependent insulinotropic polypeptide receptor (“GIPR”), wherein the antibody comprises a light chain and a heavy chain, wherein the light chain comprises the amino acid sequence of SEQ ID NO: 388 and the heavy chain comprises the amino acid sequence of SEQ ID NO: 1571,
[2950] wherein:
   [2951] an ε-amino group of a lysine residue at position 28 of the polypeptide is covalently linked to a C-terminus of the linker polypeptide; and
   [2952] an N-terminus of the linker polypeptide is conjugated to a cysteine residue at position 275 of the heavy chain of the antibody.

[2953] E216. A molecule comprising:
[2954] a first polypeptide and a second polypeptide that agonize a glucagon receptor (“GCGR”), wherein the first polypeptide and the second polypeptide each comprise the amino acid sequence of SEQ ID NO: 1615;
[2955] a first linker polypeptide and a second linker polypeptide, wherein the first linker polypeptide and the second linker polypeptide each comprise the amino acid sequence of SEQ ID NO: 1629; and
[2956] an antibody that specifically binds to a glucose-dependent insulinotropic polypeptide receptor (“GIPR”), wherein the antibody comprises a first light chain and a second light chain, wherein the first light chain and the second light chain each comprise the amino acid sequence of SEQ ID NO: 388, and a first heavy chain and a second heavy chain, wherein the first heavy chain and the second heavy chain each comprise the amino acid sequence of SEQ ID NO: 1571,
[2957] wherein:
   [2958] an ε-amino group of a lysine residue at position 28 of the first polypeptide is covalently linked to a C-terminus of the first linker polypeptide;
   [2959] an N-terminus of the first linker polypeptide is conjugated to a cysteine residue at position 275 of the first heavy chain of the antibody;
   [2960] an ε-amino group of a lysine residue at position 28 of the second polypeptide is covalently linked to a C-terminus of the second linker polypeptide; and
   [2961] an N-terminus of the second linker polypeptide is conjugated to a cysteine residue at position 275 of the second heavy chain of the antibody.

[2962] E217. A molecule comprising:
[2963] a first polypeptide and a second polypeptide that agonize a glucagon receptor (“GCGR”), wherein the first polypeptide and the second polypeptide each comprise the amino acid sequence of SEQ ID NO: 1626;
[2964] a first linker polypeptide and a second linker polypeptide, wherein the first linker polypeptide and the second linker polypeptide each comprise the amino acid sequence of SEQ ID NO: 1628; and
[2965] an antibody that specifically binds to a glucose-dependent insulinotropic polypeptide receptor (“GIPR”), wherein the antibody comprises a first light chain and a second light chain, wherein the first light chain and the second light chain each comprise the amino acid sequence of SEQ ID NO: 388, and a first heavy chain and a second heavy chain, wherein the first heavy chain and the second heavy chain each comprise the amino acid sequence of SEQ ID NO: 1571,
[2966] wherein:
   [2967] an ε-amino group of a lysine residue at position 28 of the first polypeptide is covalently linked to a C-terminus of the first linker polypeptide;
   [2968] an N-terminus of the first linker polypeptide is conjugated to a cysteine residue at position 275 of the first heavy chain of the antibody;
   [2969] an ε-amino group of a lysine residue at position 28 of the second polypeptide is covalently linked to a C-terminus of the second linker polypeptide; and
   [2970] an N-terminus of the second linker polypeptide is conjugated to a cysteine residue at position 275 of the second heavy chain of the antibody.

[2971] E218. A molecule comprising:
[2972] a first polypeptide and a second polypeptide that agonize a glucagon receptor (“GCGR”), wherein the first polypeptide and the second polypeptide each comprise the amino acid sequence of SEQ ID NO: 1592;
[2973] a first linker polypeptide and a second linker polypeptide, wherein the first linker polypeptide and the second linker polypeptide each comprise the amino acid sequence of SEQ ID NO: 1628; and
[2974] an antibody that specifically binds to a glucose-dependent insulinotropic polypeptide receptor (“GIPR”), wherein the antibody comprises a first light chain and a second light chain, wherein the first light chain and the second light chain each comprise the amino acid sequence of SEQ ID NO: 388, and a first heavy chain and a second heavy chain, wherein the first heavy chain and the second heavy chain each comprise the amino acid sequence of SEQ ID NO: 1571,
[2975] wherein:
   [2976] an ε-amino group of a lysine residue at position 24 of the first polypeptide is covalently linked to a C-terminus of the first linker polypeptide;
   [2977] an N-terminus of the first linker polypeptide is conjugated to a cysteine residue at position 275 of the first heavy chain of the antibody;
   [2978] an ε-amino group of a lysine residue at position 24 of the second polypeptide is covalently linked to a C-terminus of the second linker polypeptide; and
   [2979] an N-terminus of the second linker polypeptide is conjugated to a cysteine residue at position 275 of the second heavy chain of the antibody.

[2980] E219. A molecule comprising:
[2981] a first polypeptide and a second polypeptide that agonize a glucagon receptor (“GCGR”), wherein the first polypeptide and the second polypeptide each comprise the amino acid sequence of SEQ ID NO: 1626;
[2982] a first linker polypeptide and a second linker polypeptide, wherein the first linker polypeptide and the second linker polypeptide each comprise the amino acid sequence of SEQ ID NO: 1629; and
[2983] an antibody that specifically binds to a glucose-dependent insulinotropic polypeptide receptor (“GIPR”), wherein the antibody comprises a first light chain and a second light chain, wherein the first light chain and the second light chain each comprise the amino acid sequence of SEQ ID NO: 388, and a first heavy chain and a second heavy chain, wherein the first heavy chain and the second heavy chain each comprise the amino acid sequence of SEQ ID NO: 1571,
[2984] wherein:
   [2985] an ε-amino group of a lysine residue at position 28 of the first polypeptide is covalently linked to a C-terminus of the first linker polypeptide;
   [2986] an N-terminus of the first linker polypeptide is conjugated to a cysteine residue at position 275 of the first heavy chain of the antibody;
   [2987] an ε-amino group of a lysine residue at position 28 of the second polypeptide is covalently linked to a C-terminus of the second linker polypeptide; and
   [2988] an N-terminus of the second linker polypeptide is conjugated to a cysteine residue at position 275 of the second heavy chain of the antibody.

[2989] E220. A molecule comprising:
[2990] a first polypeptide and a second polypeptide that agonize a glucagon receptor (“GCGR”), wherein the first polypeptide and the second polypeptide each comprise the amino acid sequence of SEQ ID NO: 1587;
[2991] a first linker polypeptide and a second linker polypeptide, wherein the first linker polypeptide and the second linker polypeptide each comprise the amino acid sequence of SEQ ID NO: 1628; and
[2992] an antibody that specifically binds to a glucose-dependent insulinotropic polypeptide receptor (“GIPR”), wherein the antibody comprises a first light chain and a second light chain, wherein the first light chain and the second light chain each comprise the amino acid sequence of SEQ ID NO: 388, and a first heavy chain and a second heavy chain, wherein the first heavy chain and the second heavy chain each comprise the amino acid sequence of SEQ ID NO: 1571,
[2993] wherein:
   [2994] an ε-amino group of a lysine residue at position 28 of the first polypeptide is covalently linked to a C-terminus of the first linker polypeptide;
   [2995] an N-terminus of the first linker polypeptide is conjugated to a cysteine residue at position 275 of the first heavy chain of the antibody;
   [2996] an ε-amino group of a lysine residue at position 28 of the second polypeptide is covalently linked to a C-terminus of the second linker polypeptide; and
   [2997] an N-terminus of the second linker polypeptide is conjugated to a cysteine residue at position 275 of the second heavy chain of the antibody.

[2998] E221. A molecule comprising:
[2999] a first polypeptide and a second polypeptide that agonize a glucagon receptor (“GCGR”), wherein the first polypeptide and the second polypeptide each comprise the amino acid sequence of SEQ ID NO: 1587;
[3000] a first linker polypeptide and a second linker polypeptide, wherein the first linker polypeptide and the second linker polypeptide each comprise the amino acid sequence of SEQ ID NO: 1630; and
[3001] an antibody that specifically binds to a glucose-dependent insulinotropic polypeptide receptor (“GIPR”), wherein the antibody comprises a first light chain and a second light chain, wherein the first light chain and the second light chain each comprise the amino acid sequence of SEQ ID NO: 388, and a first heavy chain and a second heavy chain, wherein the first heavy chain and the second heavy chain each comprise the amino acid sequence of SEQ ID NO: 1571,
[3002] wherein:
   [3003] an ε-amino group of a lysine residue at position 28 of the first polypeptide is covalently linked to a C-terminus of the first linker polypeptide;
   [3004] an N-terminus of the first linker polypeptide is conjugated to a cysteine residue at position 275 of the first heavy chain of the antibody;
   [3005] an ε-amino group of a lysine residue at position 28 of the second polypeptide is covalently linked to a C-terminus of the second linker polypeptide; and
   [3006] an N-terminus of the second linker polypeptide is conjugated to a cysteine residue at position 275 of the second heavy chain of the antibody.

[3007] E222. A pharmaceutical composition comprising:
[3008] a polypeptide of any one of E1-E108 or a molecule of any one of E109-E221; and
[3009] a pharmaceutically acceptable excipient.

[3010] E223. A method of treating obesity in a subject in need thereof, the method comprising administering a polypeptide of any one of E1-E108, a molecule of any one of E109-E221, or a pharmaceutical composition of E222 to the subject.

[3011] E224. A polypeptide of any one of E1-E108, a molecule of any one of E109-E221, or a pharmaceutical composition of E222 for use in treating obesity.

[3012] E225. Use of a polypeptide of any one of E1-E108 or a molecule of any one of E109-E221 in the manufacture of a medicament for treating obesity.

[3013] E226. The method of E223, the polypeptide, molecule or pharmaceutical composition for use of E224, and the use of E225, wherein treating obesity comprises lowering blood glucose, insulin, triglyceride, or cholesterol levels; reducing body weight; and/or improving glucose tolerance, energy expenditure, or insulin sensitivity.

[3014] E227. A method of reducing body weight and/or food intake in a subject in need thereof, the method comprising administering a polypeptide of any one of E1-E108, a molecule of any one of E109-E221, or a pharmaceutical composition of E222 to the subject.

[3015] E228. A polypeptide of any one of E1-E108, a molecule of any one of E109-E221, or a pharmaceutical composition of E222 for use in reducing body weight and/or food intake in a subject in need thereof.

[3016] E229. Use of a polypeptide of any one of E1-E108 or a molecule of any one of E109-E221 in the manufacture of a medicament for reducing body weight and/or food intake in a subject in need thereof.

[3017] E230. The method of E227, the polypeptide, molecule or pharmaceutical composition for use of E228, and the use of E229, wherein the subject is overweight or obese.

[3018] E231. A method of treating obesity in a subject in need thereof, the method comprising administering a polypeptide of any one of E1-E108, a molecule of any one of E109-E221, or a pharmaceutical composition of E222 to the subject in combination with a GLP-1 agonist.

[3019] E232. A polypeptide of any one of E1-E108, a molecule of any one of E109-E221, or a pharmaceutical composition of E222 for use in a method of treating obesity in a subject in need thereof, wherein the method comprises administering the polypeptide, molecule, or pharmaceutical composition to the subject in combination with a GLP-1 agonist.

[3020] E233. The method of E231 or the polypeptide, molecule or pharmaceutical composition for use of E232, wherein treating obesity comprises lowering blood glucose, insulin, triglyceride, or cholesterol levels; reducing body weight; and/or improving glucose tolerance, energy expenditure, or insulin sensitivity.

[3021] E234. The method of E231 or the polypeptide, molecule or pharmaceutical composition for use of E232, wherein, prior to the administering, the subject experienced a weight-loss plateau.

[3022] E235. The method of E231 or the polypeptide, molecule or pharmaceutical composition for use of E232, wherein the GLP-1 agonist is semaglutide.

[3023] E236. A method of reducing body weight and/or food intake in a subject in need thereof, the method comprising administering a polypeptide of any one of E1-E108, a molecule of any one of E109-E221, or a pharmaceutical composition of E222 to the subject in combination with a GLP-1 agonist.

[3024] E237. A polypeptide of any one of E1-E108, a molecule of any one of E109-E221, or a pharmaceutical composition of E222 for use in a method of reducing body weight and/or food intake in a subject in need thereof, wherein the method comprises administering the polypeptide, molecule, or pharmaceutical composition to the subject in combination with a GLP-1 agonist.

[3025] E238. The method of E236 or the polypeptide, molecule, or pharmaceutical composition for use of E237, wherein the subject is overweight or obese.

[3026] E239. The method of E236 or the polypeptide, molecule, or pharmaceutical composition for use of E237, wherein the GLP-1 agonist is semaglutide.

[3027] E240. The method of E236 or the polypeptide, molecule, or pharmaceutical composition for use of E237, wherein the subject is overweight or obese and the GLP-1 agonist is semaglutide.

[3028] E241. The method of any one of E236 or E238-E240 or the polypeptide, molecule, or pharmaceutical composition for use of any one of E237-E240, wherein the GLP-1 agonist and the polypeptide, molecule, or pharmaceutical composition for use are administered in consecutive, non-overlapping dosing intervals, wherein the GLP-1 agonist is administered prior to the polypeptide, molecule, or pharmaceutical composition.

[3029] E242. The method of any one of E236 or E238-E240 or the polypeptide, molecule, or pharmaceutical composition for use of any one of E237-E240, wherein the GLP-1 agonist and the polypeptide, molecule, or pharmaceutical composition for use are administered concurrently.

[3030] E243. The method or the polypeptide, molecule, or pharmaceutical composition for use of E242, wherein at least one dose of the GLP-1 agonist is administered prior to a first administration of the polypeptide, molecule, or pharmaceutical composition.

[3031] Further non-limiting example embodiments/features of the present disclosure include:

[3032] F1. A polypeptide that agonizes a glucagon receptor (“GCGR”), wherein the polypeptide comprises an amino acid sequence with between three and nine modifications relative to SEQ ID NO: 1576, wherein the modifications are selected from:
[3033] tyrosine and phenylalanine at position 1;
[3034] d-serine, 2-aminoisobutyric acid, and d-threonine at position 2;
[3035] glutamic acid at position 3;
[3036] histidine at position 7;
[3037] tryptophan at position 10;
[3038] glutamic acid at position 15;
[3039] 2-aminoisobutyric acid, glutamine, homophenylalanine, and glutamic acid at position 16;
[3040] lysine, citrulline, glutamine, and alanine at position 17;
[3041] 2-naphthylalanine, L-4,4′-biphenylalanine, alanine, citrulline, and lysine at position 18;
[3042] 4-chloro-L-phenylalanine, alanine, d-glutamine, homoserine, histidine, arginine, and glutamic acid at position 20;
[3043] glutamic acid, citrulline, and d-aspartic acid at position 21;
[3044] tryptophan and β-cyclohexyl-L-alanine at position 22;
[3045] aspartic acid, lysine, alanine, 2-aminoisobutyric acid, glycine, histidine, asparagine, threonine, d-glutamine, glutamic acid, arginine, phenylalanine, leucine, serine, tyrosine, valine, isoleucine, homoserine, and 2,3-diaminopropionic acid at position 24;
[3046] 5-bromo-L-tryptophan, tyrosine, L-beta-homotryptophan, 5-methoxy-L-tryptophan, 5-methyl-L-tryptophan, 6-bromo-L-tryptophan, 6-chloro-L-tryptophan, 6-methyl-L-tryptophan, and 7-bromo-L-tryptophan at position 25;
[3047] leucine, glutamic acid, and L-α-aminoadipic acid at position 27;
[3048] lysine, aspartic acid, serine, 6-azido-L-lysine, glutamic acid, and alanine at position 28;
[3049] glutamic acid, serine, aspartic acid, and alanine at position 29;
[3050] an additional amino acid at position 30, wherein the additional amino acid is lysine; and
[3051] an additional amino acid at position 31, wherein the additional amino acid is lysine.

[3052] F2. The polypeptide of F1, wherein the modifications are selected from: tyrosine and phenylalanine at position 1;
[3053] d-serine, 2-aminoisobutyric acid, and d-threonine at position 2;
[3054] glutamic acid at position 3;
[3055] histidine at position 7;
[3056] tryptophan at position 10;
[3057] glutamic acid at position 15;
[3058] 2-aminoisobutyric acid, glutamine, homophenylalanine, and glutamic acid at position 16;
[3059] lysine, citrulline, glutamine, and alanine at position 17;
[3060] 2-naphthylalanine, L-4,4′-biphenylalanine, alanine, citrulline, and lysine at position 18;
[3061] 4-chloro-L-phenylalanine, alanine, d-glutamine, homoserine, histidine, arginine, and glutamic acid at position 20;
[3062] glutamic acid, citrulline, and d-aspartic acid at position 21;
[3063] tryptophan and β-cyclohexyl-L-alanine at position 22;
[3064] aspartic acid, lysine, alanine, 2-aminoisobutyric acid, glycine, histidine, asparagine, threonine, d-glutamine, glutamic acid, arginine, phenylalanine, leucine, serine, tyrosine, valine, isoleucine, homoserine, and 2,3-diaminopropionic acid at position 24;
[3065] 5-bromo-L-tryptophan, tyrosine, L-beta-homotryptophan, 5-methoxy-L-tryptophan, 5-methyl-L-tryptophan, 6-bromo-L-tryptophan, 6-chloro-L-tryptophan, 6-methyl-L-tryptophan, and 7-bromo-L-tryptophan at position 25;
[3066] leucine, glutamic acid, and L-α-aminoadipic acid at position 27;
[3067] lysine, aspartic acid, serine, 6-azido-L-lysine, glutamic acid, and alanine at position 28;
[3068] glutamic acid, serine, aspartic acid, and alanine at position 29.

[3069] F3. The polypeptide of F1 or F2, wherein the modifications comprise d-serine at position 2.

[3070] F4. The polypeptide of any one of F1 to F3, wherein the modifications comprise 2-aminoisobutyric acid at position 16.

[3071] F5. The polypeptide of any one of F1 to F4, wherein the modifications comprise d-serine at position 2 and 2-aminoisobutyric acid at position 16.

[3072] F6. The polypeptide of any one of F1 to F5, wherein the modifications comprise lysine at position 17.

[3073] F7. The polypeptide of any one of F1 to F6, wherein the modifications comprise glutamic acid at position 21.

[3074] F8. The polypeptide of any one of F1 to F7, wherein the modifications comprise lysine, alanine, or glutamic acid at position 24.

[3075] F9. The polypeptide of any one of F1 to F8, wherein the modifications comprise 5-bromo-L-tryptophan at position 25.

[3076] F10. The polypeptide of any one of F1 to F9, wherein the modifications comprise leucine or glutamic acid at position 27.

[3077] F11. The polypeptide of any one of F1 to F10, wherein the modifications comprise lysine, aspartic acid, or glutamic acid at position 28.

[3078] F12. The polypeptide of any one of F1 to F11, wherein the modifications comprise glutamic acid or serine at position 29.

[3079] F13. The polypeptide of any one of F1 to F12, wherein the modifications comprise lysine at position 24 or position 28.

[3080] F14. The polypeptide of any one of F1 to F13, wherein the polypeptide comprises 29 amino acids.

[3081] F15. The polypeptide of any one of F1 or F3 to F13, wherein the polypeptide comprises 31 amino acids, and further wherein the polypeptide comprises lysine at position 30 and lysine at position 31.

[3082] F16. The polypeptide of F1, wherein the modifications comprise d-serine at position 2, 2-aminoisobutyric acid at position 16, and between one and seven other modifications selected from:
[3083] lysine at position 17;
[3084] glutamic acid at position 21;
[3085] lysine, alanine, and glutamic acid at position 24;
[3086] 5-bromo-L-tryptophan at position 25;
[3087] leucine and glutamic acid at position 27;
[3088] lysine, aspartic acid, and glutamic acid at position 28; and
[3089] glutamic acid and serine at position 29.

[3090] F17. The polypeptide of F1 or F16, wherein the modifications comprise d-serine at position 2, 2-aminoisobutyric acid at position 16, and between one and six other modifications selected from:
[3091] lysine at position 17;
[3092] glutamic acid at position 21;
[3093] lysine, alanine, and glutamic acid at position 24;
[3094] leucine and glutamic acid at position 27;
[3095] lysine, aspartic acid, and glutamic acid at position 28; and
[3096] glutamic acid and serine at position 29.

[3097] F18. The polypeptide of F1, F16, or F17, wherein the modifications comprise d-serine at position 2, 2-aminoisobutyric acid at position 16, and one or two other modifications selected from:
[3098] lysine at position 24; and
[3099] lysine and glutamic acid at position 28.

[3100] F19. The polypeptide of any one of F16 to F18, wherein the polypeptide comprises 29 amino acids.

[3101] F20. A polypeptide that agonizes a glucagon receptor (“GCGR”), wherein the polypeptide comprises at least 28 amino acids, wherein the polypeptide comprises a d-serine at position 2 and a 2-aminoisobutyric acid at position 16; and the polypeptide has at least 89% (e.g., at least 93%, at least 96%, or 100%) sequence identity to the amino acid sequence of SEQ ID NO: 1822.

[3102] F21. The polypeptide of F20, wherein the polypeptide has at least 93% sequence identity to the amino acid sequence of SEQ ID NO: 93.

[3103] F22. The polypeptide of F20 or F21, wherein the polypeptide comprises the amino acid sequence of SEQ ID NO: 1822.

[3104] F23. The polypeptide of F20, F21, or F22, wherein the polypeptide comprises 29 amino acids.

[3105] F24. The polypeptide of any one of F20 to F23, wherein the polypeptide consists of the amino acid sequence of SEQ ID NO: 1822.

[3106] F25. A polypeptide that agonizes a glucagon receptor (“GCGR”), wherein the polypeptide comprises the amino acid sequence of any one of SEQ ID NOs: 1587-1627, 1747-1840, 1859-1862, or 1879-1881.

[3107] F26. The polypeptide of F25, wherein the polypeptide comprises the amino acid sequence of any one of SEQ ID NOs: 1587-1627 or 1747.

[3108] F27. The polypeptide of F25, wherein the polypeptide comprises the amino acid sequence of any one of SEQ ID NOs: 1747-1840, 1859-1862, or 1879-1881.

[3109] F28. The polypeptide of F25, wherein the polypeptide comprises the amino acid sequence of any one of SEQ ID NOs: 1596, 1597, 1615, 1626, 1818, 1822, 1825, or 1826.

[3110] F29. The polypeptide of F25, wherein the polypeptide comprises the amino acid sequence of any one of SEQ ID NOs: 1587, 1592, 1596, 1615, or 1626.

[3111] F30. The polypeptide of F25, wherein the polypeptide comprises the amino acid sequence of any one of SEQ ID NOs: 1626, 1818, 1822, 1825, or 1826.

[3112] F31. The polypeptide of F25, wherein the polypeptide comprises the amino acid sequence of SEQ ID NO: 1587.

[3113] F32. The polypeptide of F25 or F31, wherein the polypeptide consists of the amino acid sequence of SEQ ID NO: 1587.

[3114] F33. The polypeptide of F25, wherein the polypeptide comprises the amino acid sequence of SEQ ID NO: 1592.

[3115] F34. The polypeptide of F25 or F33, wherein the polypeptide consists of the amino acid sequence of SEQ ID NO: 1592.

[3116] F35. The polypeptide of F25, wherein the polypeptide comprises the amino acid sequence of SEQ ID NO: 1596.

[3117] F36. The polypeptide of F25 or F35, wherein the polypeptide consists of the amino acid sequence of SEQ ID NO: 1596.

[3118] F37. The polypeptide of F25, wherein the polypeptide comprises the amino acid sequence of SEQ ID NO: 1597.

[3119] F38. The polypeptide of F25 or F37, wherein the polypeptide consists of the amino acid sequence of SEQ ID NO: 1597.

[3120] F39. The polypeptide of F25, wherein the polypeptide comprises the amino acid sequence of SEQ ID NO: 1615.

[3121] F40. The polypeptide of F25 or F39, wherein the polypeptide consists of the amino acid sequence of SEQ ID NO: 1615.

[3122] F41. The polypeptide of F25, wherein the polypeptide comprises the amino acid sequence of SEQ ID NO: 1626.

[3123] F42. The polypeptide of F25 or F41, wherein the polypeptide consists of the amino acid sequence of SEQ ID NO: 1626.

[3124] F43. The polypeptide of F25, wherein the polypeptide comprises the amino acid sequence of SEQ ID NO: 1818.

[3125] F44. The polypeptide of F25 or F43, wherein the polypeptide consists of the amino acid sequence of SEQ ID NO: 1818.

[3126] F45. The polypeptide of F25, wherein the polypeptide comprises the amino acid sequence of SEQ ID NO: 1822.

[3127] F46. The polypeptide of F25 or F45, wherein the polypeptide consists of the amino acid sequence of SEQ ID NO: 1822.

[3128] F47. The polypeptide of F25, wherein the polypeptide comprises the amino acid sequence of SEQ ID NO: 1825.

[3129] F48. The polypeptide of F25 or F47, wherein the polypeptide consists of the amino acid sequence of SEQ ID NO: 1825.

[3130] F49. The polypeptide of F25, wherein the polypeptide comprises the amino acid sequence of SEQ ID NO: 1826.

[3131] F50. The polypeptide of F25 or F49, wherein the polypeptide consists of the amino acid sequence of SEQ ID NO: 1826.

[3132] F51. The polypeptide of F25 or F26, wherein the polypeptide consists of the amino acid sequence of any one of SEQ ID NOs: 1587-1627 or 1747.

[3133] F52. The polypeptide of F25 or F27, wherein the polypeptide consists of the amino acid sequence of any one of SEQ ID NOs: 1747-1840, 1859-1862, or 1879-1881.

[3134] F53. The polypeptide of F25 or F28, wherein the polypeptide consists of the amino acid sequence of any one of SEQ ID NOs: 1596, 1597, 1615, 1626, 1818, 1822, 1825, or 1826.

[3135] F54. The polypeptide of F25 or F29, wherein the polypeptide consists of the amino acid sequence of any one of SEQ ID NOs: 1587, 1592, 1596, 1615, or 1626.

[3136] F55. The polypeptide of F25 or F30, wherein the polypeptide consists of the amino acid sequence of any one of SEQ ID NOs: 1626, 1818, 1822, 1825, or 1826.

[3137] F56. A molecule comprising:
[3138] a first polypeptide that agonizes a glucagon receptor (“GCGR”), wherein the first polypeptide is selected from the polypeptides of any one of F1-F55; and
[3139] a second polypeptide,
[3140] wherein the C-terminus of the second polypeptide is covalently linked to an ε-amino group of a lysine residue of the first polypeptide.

[3141] F57. The molecule of F56, wherein the second polypeptide comprises the amino acid sequence of any one of SEQ ID NOs: 1628-1683, 1739-1746, or 1841-1852.

[3142] F58. The molecule of F56 or F57, wherein the second polypeptide comprises the amino acid sequence of any one of SEQ ID NOs: 1628-1683, 1739, 1850, or 1851.

[3143] F59. The molecule of any one of F56 to F58, wherein the second polypeptide comprises the amino acid sequence of any one of SEQ ID NOs: 1628-1630.

[3144] F60. The molecule of any one of F56 to F59, wherein the second polypeptide comprises the amino acid sequence of SEQ ID NO: 1628.

[3145] F61. The molecule of any one of F56 to F59, wherein the second polypeptide comprises the amino acid sequence of SEQ ID NO: 1629.

[3146] F62. The molecule of any one of F56 to F59, wherein the second polypeptide comprises the amino acid sequence of SEQ ID NO: 1630.

[3147] F63. The molecule of any one of F56 to F62, wherein the C-terminus of the second polypeptide is covalently linked to the ε-amino group of a lysine at position 21, position 24, position 28, or position 31 of the first polypeptide (e.g., the ε-amino group of a lysine residue at position 21, position 24, position 28, or position 31 of the first polypeptide has been condensed with a carboxyl group of the C-terminus of the second polypeptide to form an amide bond between the first polypeptide and the second polypeptide).

[3148] F64. The molecule of any one of F56 to F63, wherein the C-terminus of the second polypeptide is covalently linked to the ε-amino group of a lysine at position 24 or position 28 of the first polypeptide.

[3149] F65. The molecule of any one of F56 to F63, wherein the C-terminus of the second polypeptide is covalently linked to the ε-amino group of a lysine at position 21 of the first polypeptide.

[3150] F66. The molecule of any one of F56 to F63 or F64, wherein the C-terminus of the second polypeptide is covalently linked to the ε-amino group of a lysine at position 24 of the first polypeptide.

[3151] F67. The molecule of any one of F56 to F63 or F64, wherein the C-terminus of the second polypeptide is covalently linked to the ε-amino group of a lysine at position 28 of the first polypeptide.

[3152] F68. The molecule of any one of F56 to F63, wherein the C-terminus of the second polypeptide is covalently linked to the ε-amino group of a lysine at position 31 of the first polypeptide.

[3153] F69. The molecule of any one of F56 to F63, wherein the first polypeptide comprises the amino acid sequence of any one of SEQ ID NOs: 1587-1627, 1747-1749, 1751-1792, 1794-1798, 1801-1830, 1833-1840, 1859-1862, or 1879-1881.

[3154] F70. The molecule of F56, wherein the first polypeptide comprises an amino acid sequence selected from SEQ ID NOs: 1587-1627, 1747-1749, 1751-1792, 1794-1798, 1801-1830, 1833-1840, and 1859-1862, and the second polypeptide comprises the amino acid sequence of any one of SEQ ID NOs: 1628-1683, 1739, 1850, or 1851.

[3155] F71. The molecule of F56, wherein the first polypeptide comprises an amino acid sequence selected from SEQ ID NOs: 1587-1627, 1747-1749, 1751-1792, 1794-1798, 1801-1830, 1833-1840, and 1859-1862, and the second polypeptide comprises the amino acid sequence of any one of SEQ ID NOs: 1628, 1629, 1630, 1631, 1632, 1640, or 1644.

[3156] F72. The molecule of F56, wherein the second polypeptide comprises the amino acid sequence of SEQ ID NO: 1628, 1629, 1630, 1631, 1632, 1640, or 1644.

[3157] F73. The molecule of F56, wherein the first polypeptide comprises the amino acid sequence of SEQ ID NO: 1860, the second polypeptide comprises the amino acid sequence of any one of SEQ ID NOs: 1628-1683, 1739, 1850, or 1851, and the C-terminus of the second polypeptide is covalently linked to the ε-amino group of a lysine at position 21 of the first polypeptide.

[3158] F74. The molecule of F56, wherein the first polypeptide comprises the amino acid sequence of any one of SEQ ID NOs: 1589, 1592, 1594, 1597, 1598, 1613, 1625, 1762, 1766-1768, 1787, 1788, 1797, 1798, 1804, 1805, 1811, 1812, 1821, 1822, 1833, 1837, or 1838, the second polypeptide comprises the amino acid sequence of any one of SEQ ID NOs: 1628-1683, 1739, 1850, or 1851, and the C-terminus of the second polypeptide is covalently linked to the ε-amino group of a lysine at position 24 of the first polypeptide.

[3159] F75. The molecule of F56, wherein the first polypeptide comprises the amino acid sequence of any one of SEQ ID NOs: 1587, 1588, 1590, 1591, 1593, 1595, 1596, 1599-1612, 1614-1624, 1626, 1627, 1747-1749, 1751-1761, 1763-1765, 1769-1786, 1790-1792, 1794-1796, 1801-1803, 1806-1810, 1813-1820, 1823-1830, 1834-1836, 1839, 1840, 1859, 1861, or 1862, the second polypeptide comprises the amino acid sequence of any one of SEQ ID NOs: 1628-1683, 1739, 1850, or 1851, and the C-terminus of the second polypeptide is covalently linked to the ε-amino group of a lysine at position 28 of the first polypeptide.

[3160] F76. The molecule of F56, wherein the first polypeptide comprises the amino acid sequence of SEQ ID NO: 1789, the second polypeptide comprises the amino acid sequence of any one of SEQ ID NOs: 1628-1683, 1739, 1850, or 1851, and the C-terminus of the second polypeptide is covalently linked to the ε-amino group of a lysine at position 31 of the first polypeptide.

[3161] F77. The molecule of any one of F56 to F76, wherein the N-terminal amino acid residue of the second polypeptide is modified for coupling to a cysteine residue.

[3162] F78. The molecule of any one of F56 to F77, wherein the N-terminal amino acid residue of the second polypeptide is bromoacetylated.

[3163] F79. A molecule comprising:
[3164] a first polypeptide that agonizes a glucagon receptor (“GCGR”), wherein the first polypeptide is selected from the polypeptides of any one of F1-F55; and
[3165] a second polypeptide,
[3166] wherein the C-terminal amino acid residue of the first polypeptide is covalently linked to the N-terminal amino acid residue of the second polypeptide.

[3167] F80. The molecule of F79, wherein the second polypeptide comprises the amino acid sequence of any one of SEQ ID NOs: 1628-1683, 1739-1746, or 1841-1852.

[3168] F81. The molecule of F79 or F80, wherein the second polypeptide comprises the amino acid sequence of any one of SEQ ID NOs: 1740-1746, 1841-1849, or 1852.

[3169] F82. The molecule of any one of F79 to F81, wherein the first polypeptide comprises the amino acid sequence of any one of SEQ ID NOs: 1793, 1799, 1800, 1831, or 1832.

[3170] F83. The molecule of F79, wherein the first polypeptide comprises an amino acid sequence selected from SEQ ID NOs: 1793, 1799, 1800, 1831, and 1832, and the second polypeptide comprises the amino acid sequence of any one of SEQ ID NOs: 1740-1746, 1841-1849, or 1852.

[3171] F84. The molecule of any one of F79 to F83, wherein the C-terminal amino acid residue of the second polypeptide is modified for coupling to a cysteine residue.

[3172] F85. The molecule of any one of F79 to F84, wherein the C-terminal amino acid residue of the second polypeptide is bromoacetylated.

[3173] F86. A molecule comprising:
[3174] a polypeptide that agonizes a glucagon receptor (“GCGR”), wherein the polypeptide is selected from the polypeptides of any one of F1-F55; and
[3175] a half-life extending domain (e.g., an Fc-containing polypeptide).

[3176] F87. The molecule of F86, wherein the half-life extending domain is an Fc-containing polypeptide.

[3177] F88. The molecule of F86 or F87, wherein:
[3178] the half-life extending domain is an Fc-containing polypeptide;
   [3179] an ε-amino group of a lysine residue of the polypeptide is covalently linked to a C-terminus of a linker polypeptide; and
   [3180] an N-terminus of the linker polypeptide is conjugated to a cysteine residue of the Fc-containing polypeptide.

[3181] F89. The molecule of F86 or F87, wherein:
[3182] the half-life extending domain is an Fc-containing polypeptide;
[3183] a C-terminal amino acid residue of the polypeptide is covalently linked to an N-terminal amino acid residue of the linker polypeptide; and
[3184] a C-terminal amino acid residue of the linker polypeptide is conjugated to a cysteine residue of the Fc-containing polypeptide.

[3185] F90. The molecule of F88 or F89, wherein the linker polypeptide is a linear polypeptide.

[3186] F91. The molecule of any one of F88 to F90, wherein the linker polypeptide comprises the amino acid sequence of any one of SEQ ID NOs: 1628-1683, 1739-1746, or 1841-1852.

[3187] F92. The molecule of F88, wherein the linker polypeptide comprises the amino acid sequence of any one of SEQ ID NOs: 1628-1683, 1739, 1850, or 1851.

[3188] F93. The molecule of F88 or F92, wherein the polypeptide comprises the amino acid sequence of any one of SEQ ID NOs: 1587-1627, 1747-1749, 1751-1792, 1794-1798, 1801-1830, 1833-1840, 1859-1862, or 1879-1881.

[3189] F94. The molecule of F89, wherein the linker polypeptide comprises the amino acid sequence of any one of SEQ ID NOs: 1740-1746, 1841-1849, or 1852.

[3190] F95. The molecule of F89 or F94, wherein the polypeptide comprises the amino acid sequence of any one of SEQ ID NOs: 1793, 1799, 1800, 1831, or 1832.

[3191] F96. The molecule of any one of F88 to F91, wherein the linker polypeptide comprises the amino acid sequence of any one of SEQ ID NOs: 1628-1683.

[3192] F97. The molecule of any one of F88 to F91, wherein the linker polypeptide comprises the amino acid sequence of any one of SEQ ID NOs: 1628-1630.

[3193] F98. The molecule of any one of F88 to F91, wherein the linker polypeptide comprises the amino acid sequence of SEQ ID NO: 1628.

[3194] F99. The molecule of any one of F88 to F91, wherein the linker polypeptide comprises the amino acid sequence of SEQ ID NO: 1629.

[3195] F100. The molecule of any one of F88 to F91, wherein the linker polypeptide comprises the amino acid sequence of SEQ ID NO: 1630.

[3196] F101. The molecule of any one of F88 to F91 or F96 to F100, wherein the polypeptide comprises the amino acid sequence of any one of SEQ ID NOs: 1587-1627, 1747-1840, 1859-1862, or 1879-1881.

[3197] F102. The molecule of any one of F88 to F91 or F96 to F101, wherein the polypeptide comprises the amino acid sequence of any one of SEQ ID NOs: 1587-1627 or 1747.

[3198] F103. The molecule of any one of F88 to F91 or F96 to F102, wherein the polypeptide comprises the amino acid sequence of any one of SEQ ID NOs: 1587-1627.

[3199] F104. The molecule of any one of F88 to F91 or F96 to F103, wherein the polypeptide comprises the amino acid sequence of any one of SEQ ID NOs: 1588 or 1596-1611.

[3200] F105. The molecule of any one of F86-F92, F94, or F96-F101, wherein the polypeptide comprises the amino acid sequence of any one of SEQ ID NOs: 1587, 1592, 1615, 1626, 1818, 1822, 1825, or 1826.

[3201] F106. The molecule of any one of F86-F92, F94, or F96-F101, wherein the polypeptide comprises the amino acid sequence of any one of SEQ ID NOs: 1587, 1592, 1596, 1615, or 1626.

[3202] F107. The molecule of any one of F86-F92, F94, or F96-F101, wherein the polypeptide comprises the amino acid sequence of any one of SEQ ID NOs: 1587, 1592, 1615, or 1626.

[3203] F108. The molecule of any one of F86-F92, F94, or F96-F101, wherein the polypeptide comprises the amino acid sequence of any one of SEQ ID NOs: 1626, 1818, 1822, 1825, or 1826.

[3204] F109. The molecule of any one of F86-F92, F94, F96-F103, or F105-F107, wherein the polypeptide comprises the amino acid sequence of SEQ ID NO: 1587.

[3205] F110. The molecule of any one of F86-F92, F94, F96-F103, or F105-F107, wherein the polypeptide comprises the amino acid sequence of SEQ ID NO: 1592.

[3206] Fill. The molecule of any one of F86-F92, F94, F96-F104, or F106, wherein the polypeptide comprises the amino acid sequence of SEQ ID NO: 1596.

[3207] F112. The molecule of any one of F86-F92, F94, F96-F103, or F105-107, wherein the polypeptide comprises the amino acid sequence of SEQ ID NO: 1615.

[3208] F113. The molecule of any one of F86-F92, F94, F96-F103, or F105-F108, wherein the polypeptide comprises the amino acid sequence of SEQ ID NO: 1626.

[3209] F114. The molecule of any one of F86-F92, F94, F96-F101, F105, or F108, wherein the polypeptide comprises the amino acid sequence of SEQ ID NO: 1818.

[3210] F115. The molecule of any one of F86-F92, F94, F96-F101, F105, or F108, wherein the polypeptide comprises the amino acid sequence of SEQ ID NO: 1822.

[3211] F116. The molecule of any one of F86-F92, F94, F96-F101, F105, or F108, wherein the polypeptide comprises the amino acid sequence of SEQ ID NO: 1825.

[3212] F117. The molecule of any one of F86-F92, F94, F96-F101, F105, or F108, wherein the polypeptide comprises the amino acid sequence of SEQ ID NO: 1826.

[3213] F118. The molecule of any one of F86-F117, wherein the half-life extending domain is an antibody fragment.

[3214] F119. The molecule of any one of F86-F117, wherein the half-life extending domain is an antibody.

[3215] F120. The molecule of F119, wherein the antibody is of the IgG1-, IgG2-, or IgG4-subclass.

[3216] F121. The molecule of F119 or F120, wherein the antibody is of the IgG1- or IgG2-subclass.

[3217] F122. The molecule of any one of F119-F121, wherein the antibody specifically binds to 2,4-dinitrophenol (“DNP”).

[3218] F123. The molecule of any one of F119-F121, wherein the antibody specifically binds to a glucose-dependent insulinotropic polypeptide receptor (“GIPR”).

[3219] F124. The molecule of any one of F119-121 or F123, wherein the antibody specifically binds to human GIPR.

[3220] F125. The molecule of any one of F119-121, F123, or F124, wherein the antibody inhibits binding of GIP to the extracellular portion of human GIPR.

[3221] F126. The molecule of any one of F119-121 or F123-F125, wherein the antibody comprises a CDRL1, a CDRL2, a CDRL3, a CDRH1, a CDRH2, and a CDRH3, wherein the CDRL1, the CDRL2, the CDRL3, the CDRH1, the CDRH2, and the CDRH3 comprise the amino acid sequences of SEQ ID NO: 702, SEQ ID NO: 859, SEQ ID NO: 1016, SEQ ID NO: 1173, SEQ ID NO: 1330, and SEQ ID NO: 1487, respectively.

[3222] F127. The molecule of any one of F119-121 or F123-F126, wherein the antibody comprises a light chain variable region comprising the amino acid sequence of SEQ ID NO: 74 and a heavy chain variable region comprising the amino acid sequence of SEQ ID NO: 231.

[3223] F128. The molecule of any one of any one of F119-121 or F123-F127, wherein the antibody comprises a light chain comprising the amino acid sequence of SEQ ID NO: 388 and a heavy chain comprising the amino acid sequence of SEQ ID NO: 1571.

[3224] F129. A molecule comprising:
[3225] a first polypeptide that agonizes a glucagon receptor (“GCGR”); and
[3226] an antibody that specifically binds to a glucose-dependent insulinotropic polypeptide receptor (“GIPR”).

[3227] F130. The molecule of F129, wherein:
[3228] an ε-amino group of a lysine residue of the first polypeptide is covalently linked to a C-terminus of a first linker polypeptide; and
[3229] an N-terminus of the first linker polypeptide is conjugated to a cysteine residue of the antibody.

[3230] F131. The molecule of F129, wherein:
[3231] a C-terminal amino acid residue of the first polypeptide is covalently linked to an N-terminal amino acid residue of a first linker polypeptide; and
[3232] a C-terminal amino acid residue of the first linker polypeptide is conjugated to a cysteine residue of the antibody.

[3233] F132. The molecule of any one of F129-F131, wherein the first polypeptide is glucagon or a glucagon analog.

[3234] F133. The molecule of any one of F129-F132, wherein the first polypeptide is selected from the polypeptides of any one of F1-F55.

[3235] F134. The molecule of any one of F129-F133, wherein the first polypeptide comprises the amino acid sequence of any one of SEQ ID NOs: 1587-1627, 1747-1840, 1859-1862, or 1879-1881.

[3236] F135. The molecule of any one of F129-F134, wherein the first polypeptide comprises the amino acid sequence of any one of SEQ ID NOs: 1587-1627 or 1747.

[3237] F136. The molecule of any one of F129-F135, wherein the first polypeptide comprises the amino acid sequence of any one of SEQ ID NOs: 1587-1627.

[3238] F137. The molecule of any one of F129-F136, wherein the first polypeptide comprises the amino acid sequence of any one of SEQ ID NOs: 1587, 1592, 1596, 1615, or 1626.

[3239] F138. The molecule of any one of F129-F134, wherein the first polypeptide comprises the amino acid sequence of any one of SEQ ID NOs: 1587, 1592, 1596, 1615, 1626, 1818, 1822, 1825, or 1826.

[3240] F139. The molecule of any one of F129-F134, wherein the first polypeptide comprises the amino acid sequence of any one of SEQ ID NOs: 1587, 1592, 1615, 1626, 1818, 1822, 1825, or 1826.

[3241] F140. The molecule of any one of F129-F134, wherein the first polypeptide comprises the amino acid sequence of any one of SEQ ID NOs: 1626, 1818, 1822, 1825, or 1826.

[3242] F141. The molecule of F134, wherein the first polypeptide comprises the amino acid sequence of SEQ ID NO: 1587.

[3243] F142. The molecule of F134, wherein the first polypeptide comprises the amino acid sequence of SEQ ID NO: 1592.

[3244] F143. The molecule of F134, wherein the first polypeptide comprises the amino acid sequence of SEQ ID NO: 1596.

[3245] F144. The molecule of F134, wherein the first polypeptide comprises the amino acid sequence of SEQ ID NO: 1615.

[3246] F145. The molecule of F134, wherein the first polypeptide comprises the amino acid sequence of SEQ ID NO: 1626.

[3247] F146. The molecule of F134, wherein the first polypeptide comprises the amino acid sequence of SEQ ID NO: 1818.

[3248] F147. The molecule of F134, wherein the first polypeptide comprises the amino acid sequence of SEQ ID NO: 1822.

[3249] F148. The molecule of F134, wherein the first polypeptide comprises the amino acid sequence of SEQ ID NO: 1825.

[3250] F149. The molecule of F134, wherein the first polypeptide comprises the amino acid sequence of SEQ ID NO: 1826.

[3251] F150. The molecule of any one of F129-F149, wherein the first linker polypeptide is a linear polypeptide.

[3252] F151. The molecule of any one of F129-F150, wherein the first linker polypeptide comprises the amino acid sequence of any one of SEQ ID NOs: 1628-1683, 1739-1746, or 1841-1852.

[3253] F152. The molecule of any one of F129-F151, wherein the first linker polypeptide comprises the amino acid sequence of any one of SEQ ID NOs: 1628-1683.

[3254] F153. The molecule of any one of F129-F152, wherein the first linker polypeptide comprises the amino acid sequence of any one of SEQ ID NOs: 1628-1630.

[3255] F154. The molecule of any one of F129-F153, wherein the first linker polypeptide comprises the amino acid sequence of SEQ ID NO: 1628.

[3256] F155. The molecule of any one of F129-F153, wherein the first linker polypeptide comprises the amino acid sequence of SEQ ID NO: 1629.

[3257] F156. The molecule of any one of F129-F153, wherein the first linker polypeptide comprises the amino acid sequence of SEQ ID NO: 1630.

[3258] F157. The molecule of any one of F129-F156, wherein the cysteine residue of the antibody that is conjugated to the first linker polypeptide is at a position selected from the group consisting of 88 of a light chain, 384 of a heavy chain, and 487 of a heavy chain, according to AHo numbering.

[3259] F158. The molecule of F157, wherein the cysteine residue of the antibody that is conjugated to the first linker polypeptide is at position 384 of a heavy chain, according to AHo numbering.

[3260] F159. The molecule of any one of F129-F158, further comprising a second polypeptide that agonizes a GCGR.

[3261] F160. The molecule of F159, wherein:
[3262] an ε-amino group of a lysine residue of the second polypeptide is covalently linked to a C-terminus of a second linker polypeptide; and
[3263] an N-terminus of the second linker polypeptide is conjugated to a cysteine residue of the antibody.

[3264] F161. The molecule of F159, wherein:
[3265] a C-terminal amino acid residue of the second polypeptide is covalently linked to an N-terminal amino acid residue of a second linker polypeptide; and
[3266] a C-terminal amino acid residue of the second linker polypeptide is conjugated to a cysteine residue of the antibody.

[3267] F162. The molecule of any one of F159-F161, wherein the second polypeptide is glucagon or a glucagon analog.

[3268] F163. The molecule of any one of F159-F162, wherein the second polypeptide is selected from the polypeptides of any one of F1-F55.

[3269] F164. The molecule of any one of F159-F163, wherein the second polypeptide comprises the amino acid sequence of any one of SEQ ID NOs: 1587-1627, 1747-1840, 1859-1862, or 1879-1881.

[3270] F165. The molecule of any one of F159-F164, wherein the second polypeptide comprises the amino acid sequence of any one of SEQ ID NOs: 1587-1627 or 1747.

[3271] F166. The molecule of any one of F159-F165, wherein the second polypeptide comprises the amino acid sequence of any one of SEQ ID NOs: 1587-1627.

[3272] F167. The molecule of any one of F159-F166, wherein the second polypeptide comprises the amino acid sequence of any one of SEQ ID NOs: 1587, 1592, 1596, 1615, or 1626.

[3273] F168. The molecule of any one of F159-F164, wherein the second polypeptide comprises the amino acid sequence of any one of SEQ ID NOs: 1587, 1592, 1596, 1615, 1626, 1818, 1822, 1825, or 1826.

[3274] F169. The molecule of any one of F159-F164, wherein the second polypeptide comprises the amino acid sequence of any one of SEQ ID NOs: 1587, 1592, 1615, 1626, 1818, 1822, 1825, or 1826.

[3275] F170. The molecule of any one of F159-F164, wherein the second polypeptide comprises the amino acid sequence of any one of SEQ ID NOs: 1626, 1818, 1822, 1825, or 1826.

[3276] F171. The molecule of any one of F159-F169, wherein the second polypeptide comprises the amino acid sequence of SEQ ID NO: 1587.

[3277] F172. The molecule of any one of F159-F169, wherein the second polypeptide comprises the amino acid sequence of SEQ ID NO: 1592.

[3278] F173. The molecule of any one of F159-F169, wherein the second polypeptide comprises the amino acid sequence of SEQ ID NO: 1596.

[3279] F174. The molecule of any one of F159-F169, wherein the second polypeptide comprises the amino acid sequence of SEQ ID NO: 1615.

[3280] F175. The molecule of any one of F159-F170, wherein the second polypeptide comprises the amino acid sequence of SEQ ID NO: 1626.

[3281] F176. The molecule of any one of F164 or F168-F170, wherein the second polypeptide comprises the amino acid sequence of SEQ ID NO: 1818.

[3282] F177. The molecule of any one of F164 or F168-F170, wherein the second polypeptide comprises the amino acid sequence of SEQ ID NO: 1822.

[3283] F178. The molecule of any one of F164 or F168-F170, wherein the second polypeptide comprises the amino acid sequence of SEQ ID NO: 1825.

[3284] F179. The molecule of any one of F164 or F168-F170, wherein the second polypeptide comprises the amino acid sequence of SEQ ID NO: 1826.

[3285] F180. The molecule of any one of F159-F179, wherein the first polypeptide has the same amino acid sequence as the second polypeptide.

[3286] F181. The molecule of any one of F159-F180, wherein the second linker polypeptide is a linear polypeptide.

[3287] F182. The molecule of any one of F159-F181, wherein the second linker polypeptide comprises the amino acid sequence of any one of SEQ ID NOs: 1628-1683, 1739-1746, or 1841-1852.

[3288] F183. The molecule of any one of F160-F182, wherein the second linker polypeptide comprises the amino acid sequence of any one of SEQ ID NOs: 1628-1683.

[3289] F184. The molecule of any one of F160-F183, wherein the second linker polypeptide comprises the amino acid sequence of any one of SEQ ID NOs: 1628-1630.

[3290] F185. The molecule of any one of F160-F184, wherein the second linker polypeptide comprises the amino acid sequence of SEQ ID NO: 1628.

[3291] F186. The molecule of any one of F160-F184, wherein the second linker polypeptide comprises the amino acid sequence of SEQ ID NO: 1629.

[3292] F187. The molecule of any one of F160-F184, wherein the second linker polypeptide comprises the amino acid sequence of SEQ ID NO: 1630.

[3293] F188. The molecule of any one of F160-F187, wherein the first linker polypeptide has the same amino acid sequence as the second linker polypeptide.

[3294] F189. The molecule of any one of F160-F188, wherein the cysteine residue of the antibody that is conjugated to the second linker polypeptide is at a position selected from the group consisting of 88 of a light chain, 384 of a heavy chain, and 487 of a heavy chain, according to AHo numbering.

[3295] F190. The molecule of F189, wherein the cysteine residue of the antibody that is conjugated to the second linker polypeptide is at position 384 of a heavy chain, according to AHo numbering.

[3296] F191. The molecule of any one of F160-F189, wherein the cysteine residues of the antibody that are conjugated to the first linker polypeptide and the second linker polypeptide are at positions selected from the group consisting of 88 of both light chains, 384 of both heavy chains, and 487 of both heavy chains, according to AHo numbering.

[3297] F192. The molecule of F191, wherein the cysteine residues of the antibody that are conjugated to the first linker polypeptide and the second linker polypeptide are at positions 384 of both heavy chains, according to AHo numbering.

[3298] F193. The molecule of any one of F119-F125 or F129-F192, wherein the antibody comprises a CDRL1, a CDRL2, a CDRL3, a CDRH1, a CDRH2, and a CDRH3, wherein the CDRL1, the CDRL2, the CDRL3, the CDRH1, the CDRH2, and the CDRH3 comprise amino acid sequences selected from:
[3299] i. SEQ ID NO: 629, SEQ ID NO: 786, SEQ ID NO: 943, SEQ ID NO: 1100, SEQ ID NO: 1257, and SEQ ID NO: 1414, respectively;
[3300] ii. SEQ ID NO: 630, SEQ ID NO: 787, SEQ ID NO: 944, SEQ ID NO: 1101, SEQ ID NO: 1258, and SEQ ID NO: 1415, respectively;
[3301] iii. SEQ ID NO: 631, SEQ ID NO: 788, SEQ ID NO: 945, SEQ ID NO: 1102, SEQ ID NO: 1259, and SEQ ID NO: 1416, respectively;
[3302] iv. SEQ ID NO: 632, SEQ ID NO: 789, SEQ ID NO: 946, SEQ ID NO: 1103, SEQ ID NO: 1260, and SEQ ID NO: 1417, respectively;
[3303] v. SEQ ID NO: 633, SEQ ID NO: 790, SEQ ID NO: 947, SEQ ID NO: 1104, SEQ ID NO: 1261, and SEQ ID NO: 1418, respectively;
[3304] vi. SEQ ID NO: 634, SEQ ID NO: 791, SEQ ID NO: 948, SEQ ID NO: 1105, SEQ ID NO: 1262, and SEQ ID NO: 1419, respectively;
[3305] vii. SEQ ID NO: 635, SEQ ID NO: 792, SEQ ID NO: 949, SEQ ID NO: 1106, SEQ ID NO: 1263, and SEQ ID NO: 1420, respectively;
[3306] viii. SEQ ID NO: 636, SEQ ID NO: 793, SEQ ID NO: 950, SEQ ID NO: 1107, SEQ ID NO: 1264, and SEQ ID NO: 1421, respectively;
[3307] ix. SEQ ID NO: 637, SEQ ID NO: 794, SEQ ID NO: 951, SEQ ID NO: 1108, SEQ ID NO: 1265, and SEQ ID NO: 1422, respectively;
[3308] x. SEQ ID NO: 638, SEQ ID NO: 795, SEQ ID NO: 952, SEQ ID NO: 1109, SEQ ID NO: 1266, and SEQ ID NO: 1423, respectively;
[3309] xi. SEQ ID NO: 639, SEQ ID NO: 796, SEQ ID NO: 953, SEQ ID NO: 1110, SEQ ID NO: 1267, and SEQ ID NO: 1424, respectively;
[3310] xii. SEQ ID NO: 640, SEQ ID NO: 797, SEQ ID NO: 954, SEQ ID NO: 1111, SEQ ID NO: 1268, and SEQ ID NO: 1425, respectively;
[3311] xiii. SEQ ID NO: 641, SEQ ID NO: 798, SEQ ID NO: 955, SEQ ID NO: 1112, SEQ ID NO: 1269, and SEQ ID NO: 1426, respectively;
[3312] xiv. SEQ ID NO: 642, SEQ ID NO: 799, SEQ ID NO: 956, SEQ ID NO: 1113, SEQ ID NO: 1270, and SEQ ID NO: 1427, respectively;
[3313] xv. SEQ ID NO: 643, SEQ ID NO: 800, SEQ ID NO: 957, SEQ ID NO: 1114, SEQ ID NO: 1271, and SEQ ID NO: 1428, respectively;
[3314] xvi. SEQ ID NO: 644, SEQ ID NO: 801, SEQ ID NO: 958, SEQ ID NO: 1115, SEQ ID NO: 1272, and SEQ ID NO: 1429, respectively;
[3315] xvii. SEQ ID NO: 645, SEQ ID NO: 802, SEQ ID NO: 959, SEQ ID NO: 1116, SEQ ID NO: 1273, and SEQ ID NO: 1430, respectively;
[3316] xviii. SEQ ID NO: 646, SEQ ID NO: 803, SEQ ID NO: 960, SEQ ID NO: 1117, SEQ ID NO: 1274, and SEQ ID NO: 1431, respectively;
[3317] xix. SEQ ID NO: 647, SEQ ID NO: 804, SEQ ID NO: 961, SEQ ID NO: 1118, SEQ ID NO: 1275, and SEQ ID NO: 1432, respectively;
[3318] xx. SEQ ID NO: 648, SEQ ID NO: 805, SEQ ID NO: 962, SEQ ID NO: 1119, SEQ ID NO: 1276, and SEQ ID NO: 1433, respectively;
[3319] xxi. SEQ ID NO: 649, SEQ ID NO: 806, SEQ ID NO: 963, SEQ ID NO: 1120, SEQ ID NO: 1277, and SEQ ID NO: 1434, respectively;
[3320] xxii. SEQ ID NO: 650, SEQ ID NO: 807, SEQ ID NO: 964, SEQ ID NO: 1121, SEQ ID NO: 1278, and SEQ ID NO: 1435, respectively;
[3321] xxiii. SEQ ID NO: 651, SEQ ID NO: 808, SEQ ID NO: 965, SEQ ID NO: 1122, SEQ ID NO: 1279, and SEQ ID NO: 1436, respectively;
[3322] xxiv. SEQ ID NO: 652, SEQ ID NO: 809, SEQ ID NO: 966, SEQ ID NO: 1123, SEQ ID NO: 1280, and SEQ ID NO: 1437, respectively;
[3323] xxv. SEQ ID NO: 653, SEQ ID NO: 810, SEQ ID NO: 967, SEQ ID NO: 1124, SEQ ID NO: 1281, and SEQ ID NO: 1438, respectively;
[3324] xxvi. SEQ ID NO: 654, SEQ ID NO: 811, SEQ ID NO: 968, SEQ ID NO: 1125, SEQ ID NO: 1282, and SEQ ID NO: 1439, respectively;
[3325] xxvii. SEQ ID NO: 655, SEQ ID NO: 812, SEQ ID NO: 969, SEQ ID NO: 1126, SEQ ID NO: 1283, and SEQ ID NO: 1440, respectively;
[3326] xxviii. SEQ ID NO: 656, SEQ ID NO: 813, SEQ ID NO: 970, SEQ ID NO: 1127, SEQ ID NO: 1284, and SEQ ID NO: 1441, respectively;
[3327] xxix. SEQ ID NO: 657, SEQ ID NO: 814, SEQ ID NO: 971, SEQ ID NO: 1128, SEQ ID NO: 1285, and SEQ ID NO: 1442, respectively;
[3328] xxx. SEQ ID NO: 658, SEQ ID NO: 815, SEQ ID NO: 972, SEQ ID NO: 1129, SEQ ID NO: 1286, and SEQ ID NO: 1443, respectively;
[3329] xxxi. SEQ ID NO: 659, SEQ ID NO: 816, SEQ ID NO: 973, SEQ ID NO: 1130, SEQ ID NO: 1287, and SEQ ID NO: 1444, respectively;
[3330] xxxii. SEQ ID NO: 660, SEQ ID NO: 817, SEQ ID NO: 974, SEQ ID NO: 1131, SEQ ID NO: 1288, and SEQ ID NO: 1445, respectively;
[3331] xxxiii. SEQ ID NO: 661, SEQ ID NO: 818, SEQ ID NO: 975, SEQ ID NO: 1132, SEQ ID NO: 1289, and SEQ ID NO: 1446, respectively;
[3332] xxxiv. SEQ ID NO: 662, SEQ ID NO: 819, SEQ ID NO: 976, SEQ ID NO: 1133, SEQ ID NO: 1290, and SEQ ID NO: 1447, respectively;
[3333] xxxv. SEQ ID NO: 663, SEQ ID NO: 820, SEQ ID NO: 977, SEQ ID NO: 1134, SEQ ID NO: 1291, and SEQ ID NO: 1448, respectively;
[3334] xxxvi. SEQ ID NO: 664, SEQ ID NO: 821, SEQ ID NO: 978, SEQ ID NO: 1135, SEQ ID NO: 1292, and SEQ ID NO: 1449, respectively;
[3335] xxxvii. SEQ ID NO: 665, SEQ ID NO: 822, SEQ ID NO: 979, SEQ ID NO: 1136, SEQ ID NO: 1293, and SEQ ID NO: 1450, respectively;
[3336] xxxviii. SEQ ID NO: 666, SEQ ID NO: 823, SEQ ID NO: 980, SEQ ID NO: 1137, SEQ ID NO: 1294, and SEQ ID NO: 1451, respectively;
[3337] xxxix. SEQ ID NO: 667, SEQ ID NO: 824, SEQ ID NO: 981, SEQ ID NO: 1138, SEQ ID NO: 1295, and SEQ ID NO: 1452, respectively;
[3338] xl. SEQ ID NO: 668, SEQ ID NO: 825, SEQ ID NO: 982, SEQ ID NO: 1139, SEQ ID NO: 1296, and SEQ ID NO: 1453, respectively;
[3339] xli. SEQ ID NO: 669, SEQ ID NO: 826, SEQ ID NO: 983, SEQ ID NO: 1140, SEQ ID NO: 1297, and SEQ ID NO: 1454, respectively;
[3340] xlii. SEQ ID NO: 670, SEQ ID NO: 827, SEQ ID NO: 984, SEQ ID NO: 1141, SEQ ID NO: 1298, and SEQ ID NO: 1455, respectively;
[3341] xliii. SEQ ID NO: 671, SEQ ID NO: 828, SEQ ID NO: 985, SEQ ID NO: 1142, SEQ ID NO: 1299, and SEQ ID NO: 1456, respectively;
[3342] xliv. SEQ ID NO: 672, SEQ ID NO: 829, SEQ ID NO: 986, SEQ ID NO: 1143, SEQ ID NO: 1300, and SEQ ID NO: 1457, respectively;
[3343] xlv. SEQ ID NO: 673, SEQ ID NO: 830, SEQ ID NO: 987, SEQ ID NO: 1144, SEQ ID NO: 1301, and SEQ ID NO: 1458, respectively;
[3344] xlvi. SEQ ID NO: 674, SEQ ID NO: 831, SEQ ID NO: 988, SEQ ID NO: 1145, SEQ ID NO: 1302, and SEQ ID NO: 1459, respectively;
[3345] xlvii. SEQ ID NO: 675, SEQ ID NO: 832, SEQ ID NO: 989, SEQ ID NO: 1146, SEQ ID NO: 1303, and SEQ ID NO: 1460, respectively;
[3346] xlviii. SEQ ID NO: 676, SEQ ID NO: 833, SEQ ID NO: 990, SEQ ID NO: 1147, SEQ ID NO: 1304, and SEQ ID NO: 1461, respectively;
[3347] xlix. SEQ ID NO: 677, SEQ ID NO: 834, SEQ ID NO: 991, SEQ ID NO: 1148, SEQ ID NO: 1305, and SEQ ID NO: 1462, respectively;
[3348] l. SEQ ID NO: 678, SEQ ID NO: 835, SEQ ID NO: 992, SEQ ID NO: 1149, SEQ ID NO: 1306, and SEQ ID NO: 1463, respectively;
[3349] li. SEQ ID NO: 679, SEQ ID NO: 836, SEQ ID NO: 993, SEQ ID NO: 1150, SEQ ID NO: 1307, and SEQ ID NO: 1464, respectively;
[3350] lii. SEQ ID NO: 680, SEQ ID NO: 837, SEQ ID NO: 994, SEQ ID NO: 1151, SEQ ID NO: 1308, and SEQ ID NO: 1465, respectively;
[3351] liii. SEQ ID NO: 681, SEQ ID NO: 838, SEQ ID NO: 995, SEQ ID NO: 1152, SEQ ID NO: 1309, and SEQ ID NO: 1466, respectively;
[3352] liv. SEQ ID NO: 682, SEQ ID NO: 839, SEQ ID NO: 996, SEQ ID NO: 1153, SEQ ID NO: 1310, and SEQ ID NO: 1467, respectively;
[3353] lv. SEQ ID NO: 683, SEQ ID NO: 840, SEQ ID NO: 997, SEQ ID NO: 1154, SEQ ID NO: 1311, and SEQ ID NO: 1468, respectively;
[3354] lvi. SEQ ID NO: 684, SEQ ID NO: 841, SEQ ID NO: 998, SEQ ID NO: 1155, SEQ ID NO: 1312, and SEQ ID NO: 1469, respectively;
[3355] lvii. SEQ ID NO: 685, SEQ ID NO: 842, SEQ ID NO: 999, SEQ ID NO: 1156, SEQ ID NO: 1313, and SEQ ID NO: 1470, respectively;
[3356] lviii. SEQ ID NO: 686, SEQ ID NO: 843, SEQ ID NO: 1000, SEQ ID NO: 1157, SEQ ID NO: 1314, and SEQ ID NO: 1471, respectively;
[3357] lix. SEQ ID NO: 687, SEQ ID NO: 844, SEQ ID NO: 1001, SEQ ID NO: 1158, SEQ ID NO: 1315, and SEQ ID NO: 1472, respectively;
[3358] lx. SEQ ID NO: 688, SEQ ID NO: 845, SEQ ID NO: 1002, SEQ ID NO: 1159, SEQ ID NO: 1316, and SEQ ID NO: 1473, respectively;
[3359] lxi. SEQ ID NO: 689, SEQ ID NO: 846, SEQ ID NO: 1003, SEQ ID NO: 1160, SEQ ID NO: 1317, and SEQ ID NO: 1474, respectively;
[3360] lxii. SEQ ID NO: 690, SEQ ID NO: 847, SEQ ID NO: 1004, SEQ ID NO: 1161, SEQ ID NO: 1318, and SEQ ID NO: 1475, respectively;
[3361] lxiii. SEQ ID NO: 691, SEQ ID NO: 848, SEQ ID NO: 1005, SEQ ID NO: 1162, SEQ ID NO: 1319, and SEQ ID NO: 1476, respectively;
[3362] lxiv. SEQ ID NO: 692, SEQ ID NO: 849, SEQ ID NO: 1006, SEQ ID NO: 1163, SEQ ID NO: 1320, and SEQ ID NO: 1477, respectively;
[3363] lxv. SEQ ID NO: 693, SEQ ID NO: 850, SEQ ID NO: 1007, SEQ ID NO: 1164, SEQ ID NO: 1321, and SEQ ID NO: 1478, respectively;
[3364] lxvi. SEQ ID NO: 694, SEQ ID NO: 851, SEQ ID NO: 1008, SEQ ID NO: 1165, SEQ ID NO: 1322, and SEQ ID NO: 1479, respectively;
[3365] lxvii. SEQ ID NO: 695, SEQ ID NO: 852, SEQ ID NO: 1009, SEQ ID NO: 1166, SEQ ID NO: 1323, and SEQ ID NO: 1480, respectively;
[3366] lxviii. SEQ ID NO: 696, SEQ ID NO: 853, SEQ ID NO: 1010, SEQ ID NO: 1167, SEQ ID NO: 1324, and SEQ ID NO: 1481, respectively;
[3367] lxix. SEQ ID NO: 697, SEQ ID NO: 854, SEQ ID NO: 1011, SEQ ID NO: 1168, SEQ ID NO: 1325, and SEQ ID NO: 1482, respectively;
[3368] lxx. SEQ ID NO: 698, SEQ ID NO: 855, SEQ ID NO: 1012, SEQ ID NO: 1169, SEQ ID NO: 1326, and SEQ ID NO: 1483, respectively;
[3369] lxxi. SEQ ID NO: 699, SEQ ID NO: 856, SEQ ID NO: 1013, SEQ ID NO: 1170, SEQ ID NO: 1327, and SEQ ID NO: 1484, respectively;
[3370] lxxii. SEQ ID NO: 700, SEQ ID NO: 857, SEQ ID NO: 1014, SEQ ID NO: 1171, SEQ ID NO: 1328, and SEQ ID NO: 1485, respectively;
[3371] lxxiii. SEQ ID NO: 701, SEQ ID NO: 858, SEQ ID NO: 1015, SEQ ID NO: 1172, SEQ ID NO: 1329, and SEQ ID NO: 1486, respectively;
[3372] lxxiv. SEQ ID NO: 702, SEQ ID NO: 859, SEQ ID NO: 1016, SEQ ID NO: 1173, SEQ ID NO: 1330, and SEQ ID NO: 1487, respectively;
[3373] lxxv. SEQ ID NO: 703, SEQ ID NO: 860, SEQ ID NO: 1017, SEQ ID NO: 1174, SEQ ID NO: 1331, and SEQ ID NO: 1488, respectively;
[3374] lxxvi. SEQ ID NO: 704, SEQ ID NO: 861, SEQ ID NO: 1018, SEQ ID NO: 1175, SEQ ID NO: 1332, and SEQ ID NO: 1489, respectively;
[3375] lxxvii. SEQ ID NO: 705, SEQ ID NO: 862, SEQ ID NO: 1019, SEQ ID NO: 1176, SEQ ID NO: 1333, and SEQ ID NO: 1490, respectively;
[3376] lxxviii. SEQ ID NO: 706, SEQ ID NO: 863, SEQ ID NO: 1020, SEQ ID NO: 1177, SEQ ID NO: 1334, and SEQ ID NO: 1491, respectively;
[3377] lxxix. SEQ ID NO: 707, SEQ ID NO: 864, SEQ ID NO: 1021, SEQ ID NO: 1178, SEQ ID NO: 1335, and SEQ ID NO: 1492, respectively;
[3378] lxxx. SEQ ID NO: 708, SEQ ID NO: 865, SEQ ID NO: 1022, SEQ ID NO: 1179, SEQ ID NO: 1336, and SEQ ID NO: 1493, respectively;
[3379] lxxxi. SEQ ID NO: 709, SEQ ID NO: 866, SEQ ID NO: 1023, SEQ ID NO: 1180, SEQ ID NO: 1337, and SEQ ID NO: 1494, respectively;
[3380] lxxxii. SEQ ID NO: 710, SEQ ID NO: 867, SEQ ID NO: 1024, SEQ ID NO: 1181, SEQ ID NO: 1338, and SEQ ID NO: 1495, respectively;
[3381] lxxxiii. SEQ ID NO: 711, SEQ ID NO: 868, SEQ ID NO: 1025, SEQ ID NO: 1182, SEQ ID NO: 1339, and SEQ ID NO: 1496, respectively;
[3382] lxxxiv. SEQ ID NO: 712, SEQ ID NO: 869, SEQ ID NO: 1026, SEQ ID NO: 1183, SEQ ID NO: 1340, and SEQ ID NO: 1497, respectively;
[3383] lxxxv. SEQ ID NO: 713, SEQ ID NO: 870, SEQ ID NO: 1027, SEQ ID NO: 1184, SEQ ID NO: 1341, and SEQ ID NO: 1498, respectively;
[3384] lxxxvi. SEQ ID NO: 714, SEQ ID NO: 871, SEQ ID NO: 1028, SEQ ID NO: 1185, SEQ ID NO: 1342, and SEQ ID NO: 1499, respectively;
[3385] lxxxvii. SEQ ID NO: 715, SEQ ID NO: 872, SEQ ID NO: 1029, SEQ ID NO: 1186, SEQ ID NO: 1343, and SEQ ID NO: 1500, respectively;
[3386] lxxxviii. SEQ ID NO: 716, SEQ ID NO: 873, SEQ ID NO: 1030, SEQ ID NO: 1187, SEQ ID NO: 1344, and SEQ ID NO: 1501, respectively;
[3387] lxxxix. SEQ ID NO: 717, SEQ ID NO: 874, SEQ ID NO: 1031, SEQ ID NO: 1188, SEQ ID NO: 1345, and SEQ ID NO: 1502, respectively;
[3388] xc. SEQ ID NO: 718, SEQ ID NO: 875, SEQ ID NO: 1032, SEQ ID NO: 1189, SEQ ID NO: 1346, and SEQ ID NO: 1503, respectively;
[3389] xci. SEQ ID NO: 719, SEQ ID NO: 876, SEQ ID NO: 1033, SEQ ID NO: 1190, SEQ ID NO: 1347, and SEQ ID NO: 1504, respectively;
[3390] xcii. SEQ ID NO: 720, SEQ ID NO: 877, SEQ ID NO: 1034, SEQ ID NO: 1191, SEQ ID NO: 1348, and SEQ ID NO: 1505, respectively;
[3391] xciii. SEQ ID NO: 721, SEQ ID NO: 878, SEQ ID NO: 1035, SEQ ID NO: 1192, SEQ ID NO: 1349, and SEQ ID NO: 1506, respectively;
[3392] xciv. SEQ ID NO: 722, SEQ ID NO: 879, SEQ ID NO: 1036, SEQ ID NO: 1193, SEQ ID NO: 1350, and SEQ ID NO: 1507, respectively;
[3393] xcv. SEQ ID NO: 723, SEQ ID NO: 880, SEQ ID NO: 1037, SEQ ID NO: 1194, SEQ ID NO: 1351, and SEQ ID NO: 1508, respectively;
[3394] xcvi. SEQ ID NO: 724, SEQ ID NO: 881, SEQ ID NO: 1038, SEQ ID NO: 1195, SEQ ID NO: 1352, and SEQ ID NO: 1509, respectively;
[3395] xcvii. SEQ ID NO: 725, SEQ ID NO: 882, SEQ ID NO: 1039, SEQ ID NO: 1196, SEQ ID NO: 1353, and SEQ ID NO: 1510, respectively;
[3396] xcviii. SEQ ID NO: 726, SEQ ID NO: 883, SEQ ID NO: 1040, SEQ ID NO: 1197, SEQ ID NO: 1354, and SEQ ID NO: 1511, respectively;
[3397] xcix. SEQ ID NO: 727, SEQ ID NO: 884, SEQ ID NO: 1041, SEQ ID NO: 1198, SEQ ID NO: 1355, and SEQ ID NO: 1512, respectively;
[3398] c. SEQ ID NO: 728, SEQ ID NO: 885, SEQ ID NO: 1042, SEQ ID NO: 1199, SEQ ID NO: 1356, and SEQ ID NO: 1513, respectively;
[3399] ci. SEQ ID NO: 729, SEQ ID NO: 886, SEQ ID NO: 1043, SEQ ID NO: 1200, SEQ ID NO: 1357, and SEQ ID NO: 1514, respectively;
[3400] cii. SEQ ID NO: 730, SEQ ID NO: 887, SEQ ID NO: 1044, SEQ ID NO: 1201, SEQ ID NO: 1358, and SEQ ID NO: 1515, respectively;
[3401] ciii. SEQ ID NO: 731, SEQ ID NO: 888, SEQ ID NO: 1045, SEQ ID NO: 1202, SEQ ID NO: 1359, and SEQ ID NO: 1516, respectively;
[3402] civ. SEQ ID NO: 732, SEQ ID NO: 889, SEQ ID NO: 1046, SEQ ID NO: 1203, SEQ ID NO: 1360, and SEQ ID NO: 1517, respectively;
[3403] cv. SEQ ID NO: 733, SEQ ID NO: 890, SEQ ID NO: 1047, SEQ ID NO: 1204, SEQ ID NO: 1361, and SEQ ID NO: 1518, respectively;
[3404] cvi. SEQ ID NO: 734, SEQ ID NO: 891, SEQ ID NO: 1048, SEQ ID NO: 1205, SEQ ID NO: 1362, and SEQ ID NO: 1519, respectively;
[3405] cvii. SEQ ID NO: 735, SEQ ID NO: 892, SEQ ID NO: 1049, SEQ ID NO: 1206, SEQ ID NO: 1363, and SEQ ID NO: 1520, respectively;
[3406] cviii. SEQ ID NO: 736, SEQ ID NO: 893, SEQ ID NO: 1050, SEQ ID NO: 1207, SEQ ID NO: 1364, and SEQ ID NO: 1521, respectively;
[3407] cix. SEQ ID NO: 737, SEQ ID NO: 894, SEQ ID NO: 1051, SEQ ID NO: 1208, SEQ ID NO: 1365, and SEQ ID NO: 1522, respectively;
[3408] cx. SEQ ID NO: 738, SEQ ID NO: 895, SEQ ID NO: 1052, SEQ ID NO: 1209, SEQ ID NO: 1366, and SEQ ID NO: 1523, respectively;
[3409] cxi. SEQ ID NO: 739, SEQ ID NO: 896, SEQ ID NO: 1053, SEQ ID NO: 1210, SEQ ID NO: 1367, and SEQ ID NO: 1524, respectively;
[3410] cxii. SEQ ID NO: 740, SEQ ID NO: 897, SEQ ID NO: 1054, SEQ ID NO: 1211, SEQ ID NO: 1368, and SEQ ID NO: 1525, respectively;
[3411] cxiii. SEQ ID NO: 741, SEQ ID NO: 898, SEQ ID NO: 1055, SEQ ID NO: 1212, SEQ ID NO: 1369, and SEQ ID NO: 1526, respectively;
[3412] cxiv. SEQ ID NO: 742, SEQ ID NO: 899, SEQ ID NO: 1056, SEQ ID NO: 1213, SEQ ID NO: 1370, and SEQ ID NO: 1527, respectively;
[3413] cxv. SEQ ID NO: 743, SEQ ID NO: 900, SEQ ID NO: 1057, SEQ ID NO: 1214, SEQ ID NO: 1371, and SEQ ID NO: 1528, respectively;
[3414] cxvi. SEQ ID NO: 744, SEQ ID NO: 901, SEQ ID NO: 1058, SEQ ID NO: 1215, SEQ ID NO: 1372, and SEQ ID NO: 1529, respectively;
[3415] cxvii. SEQ ID NO: 745, SEQ ID NO: 902, SEQ ID NO: 1059, SEQ ID NO: 1216, SEQ ID NO: 1373, and SEQ ID NO: 1530, respectively;
[3416] cxviii. SEQ ID NO: 746, SEQ ID NO: 903, SEQ ID NO: 1060, SEQ ID NO: 1217, SEQ ID NO: 1374, and SEQ ID NO: 1531, respectively;
[3417] cxix. SEQ ID NO: 747, SEQ ID NO: 904, SEQ ID NO: 1061, SEQ ID NO: 1218, SEQ ID NO: 1375, and SEQ ID NO: 1532, respectively;
[3418] cxx. SEQ ID NO: 748, SEQ ID NO: 905, SEQ ID NO: 1062, SEQ ID NO: 1219, SEQ ID NO: 1376, and SEQ ID NO: 1533, respectively;
[3419] cxxi. SEQ ID NO: 749, SEQ ID NO: 906, SEQ ID NO: 1063, SEQ ID NO: 1220, SEQ ID NO: 1377, and SEQ ID NO: 1534, respectively;
[3420] cxxii. SEQ ID NO: 750, SEQ ID NO: 907, SEQ ID NO: 1064, SEQ ID NO: 1221, SEQ ID NO: 1378, and SEQ ID NO: 1535, respectively;
[3421] cxxiii. SEQ ID NO: 751, SEQ ID NO: 908, SEQ ID NO: 1065, SEQ ID NO: 1222, SEQ ID NO: 1379, and SEQ ID NO: 1536, respectively;
[3422] cxxiv. SEQ ID NO: 752, SEQ ID NO: 909, SEQ ID NO: 1066, SEQ ID NO: 1223, SEQ ID NO: 1380, and SEQ ID NO: 1537, respectively;
[3423] cxxv. SEQ ID NO: 753, SEQ ID NO: 910, SEQ ID NO: 1067, SEQ ID NO: 1224, SEQ ID NO: 1381, and SEQ ID NO: 1538, respectively;
[3424] cxxvi. SEQ ID NO: 754, SEQ ID NO: 911, SEQ ID NO: 1068, SEQ ID NO: 1225, SEQ ID NO: 1382, and SEQ ID NO: 1539, respectively;
[3425] cxxvii. SEQ ID NO: 755, SEQ ID NO: 912, SEQ ID NO: 1069, SEQ ID NO: 1226, SEQ ID NO: 1383, and SEQ ID NO: 1540, respectively;
[3426] cxxviii. SEQ ID NO: 756, SEQ ID NO: 913, SEQ ID NO: 1070, SEQ ID NO: 1227, SEQ ID NO: 1384, and SEQ ID NO: 1541, respectively;
[3427] cxxix. SEQ ID NO: 757, SEQ ID NO: 914, SEQ ID NO: 1071, SEQ ID NO: 1228, SEQ ID NO: 1385, and SEQ ID NO: 1542, respectively;
[3428] cxxx. SEQ ID NO: 758, SEQ ID NO: 915, SEQ ID NO: 1072, SEQ ID NO: 1229, SEQ ID NO: 1386, and SEQ ID NO: 1543, respectively;
[3429] cxxxi. SEQ ID NO: 759, SEQ ID NO: 916, SEQ ID NO: 1073, SEQ ID NO: 1230, SEQ ID NO: 1387, and SEQ ID NO: 1544, respectively;
[3430] cxxxii. SEQ ID NO: 760, SEQ ID NO: 917, SEQ ID NO: 1074, SEQ ID NO: 1231, SEQ ID NO: 1388, and SEQ ID NO: 1545, respectively;
[3431] cxxxiii. SEQ ID NO: 761, SEQ ID NO: 918, SEQ ID NO: 1075, SEQ ID NO: 1232, SEQ ID NO: 1389, and SEQ ID NO: 1546, respectively;
[3432] cxxxiv. SEQ ID NO: 762, SEQ ID NO: 919, SEQ ID NO: 1076, SEQ ID NO: 1233, SEQ ID NO: 1390, and SEQ ID NO: 1547, respectively;
[3433] cxxxv. SEQ ID NO: 763, SEQ ID NO: 920, SEQ ID NO: 1077, SEQ ID NO: 1234, SEQ ID NO: 1391, and SEQ ID NO: 1548, respectively;
[3434] cxxxvi. SEQ ID NO: 764, SEQ ID NO: 921, SEQ ID NO: 1078, SEQ ID NO: 1235, SEQ ID NO: 1392, and SEQ ID NO: 1549, respectively;
[3435] cxxxvii. SEQ ID NO: 765, SEQ ID NO: 922, SEQ ID NO: 1079, SEQ ID NO: 1236, SEQ ID NO: 1393, and SEQ ID NO: 1550, respectively;
[3436] cxxxviii. SEQ ID NO: 766, SEQ ID NO: 923, SEQ ID NO: 1080, SEQ ID NO: 1237, SEQ ID NO: 1394, and SEQ ID NO: 1551, respectively;
[3437] cxxxix. SEQ ID NO: 767, SEQ ID NO: 924, SEQ ID NO: 1081, SEQ ID NO: 1238, SEQ ID NO: 1395, and SEQ ID NO: 1552, respectively;
[3438] cxl. SEQ ID NO: 768, SEQ ID NO: 925, SEQ ID NO: 1082, SEQ ID NO: 1239, SEQ ID NO: 1396, and SEQ ID NO: 1553, respectively;
[3439] cxli. SEQ ID NO: 769, SEQ ID NO: 926, SEQ ID NO: 1083, SEQ ID NO: 1240, SEQ ID NO: 1397, and SEQ ID NO: 1554, respectively;
[3440] cxlii. SEQ ID NO: 770, SEQ ID NO: 927, SEQ ID NO: 1084, SEQ ID NO: 1241, SEQ ID NO: 1398, and SEQ ID NO: 1555, respectively;
[3441] cxliii. SEQ ID NO: 771, SEQ ID NO: 928, SEQ ID NO: 1085, SEQ ID NO: 1242, SEQ ID NO: 1399, and SEQ ID NO: 1556, respectively;
[3442] cxliv. SEQ ID NO: 772, SEQ ID NO: 929, SEQ ID NO: 1086, SEQ ID NO: 1243, SEQ ID NO: 1400, and SEQ ID NO: 1557, respectively;
[3443] cxlv. SEQ ID NO: 773, SEQ ID NO: 930, SEQ ID NO: 1087, SEQ ID NO: 1244, SEQ ID NO: 1401, and SEQ ID NO: 1558, respectively;
[3444] cxlvi. SEQ ID NO: 774, SEQ ID NO: 931, SEQ ID NO: 1088, SEQ ID NO: 1245, SEQ ID NO: 1402, and SEQ ID NO: 1559, respectively;
[3445] cxlvii. SEQ ID NO: 775, SEQ ID NO: 932, SEQ ID NO: 1089, SEQ ID NO: 1246, SEQ ID NO: 1403, and SEQ ID NO: 1560, respectively;
[3446] cxlviii. SEQ ID NO: 776, SEQ ID NO: 933, SEQ ID NO: 1090, SEQ ID NO: 1247, SEQ ID NO: 1404, and SEQ ID NO: 1561, respectively;
[3447] cxlix. SEQ ID NO: 777, SEQ ID NO: 934, SEQ ID NO: 1091, SEQ ID NO: 1248, SEQ ID NO: 1405, and SEQ ID NO: 1562, respectively;
[3448] cl. SEQ ID NO: 778, SEQ ID NO: 935, SEQ ID NO: 1092, SEQ ID NO: 1249, SEQ ID NO: 1406, and SEQ ID NO: 1563, respectively;
[3449] cli. SEQ ID NO: 779, SEQ ID NO: 936, SEQ ID NO: 1093, SEQ ID NO: 1250, SEQ ID NO: 1407, and SEQ ID NO: 1564, respectively;
[3450] clii. SEQ ID NO: 780, SEQ ID NO: 937, SEQ ID NO: 1094, SEQ ID NO: 1251, SEQ ID NO: 1408, and SEQ ID NO: 1565, respectively;
[3451] cliii. SEQ ID NO: 781, SEQ ID NO: 938, SEQ ID NO: 1095, SEQ ID NO: 1252, SEQ ID NO: 1409, and SEQ ID NO: 1566, respectively;
[3452] cliv. SEQ ID NO: 782, SEQ ID NO: 939, SEQ ID NO: 1096, SEQ ID NO: 1253, SEQ ID NO: 1410, and SEQ ID NO: 1567, respectively;
[3453] clv. SEQ ID NO: 783, SEQ ID NO: 940, SEQ ID NO: 1097, SEQ ID NO: 1254, SEQ ID NO: 1411, and SEQ ID NO: 1568, respectively;
[3454] clvi. SEQ ID NO: 784, SEQ ID NO: 941, SEQ ID NO: 1098, SEQ ID NO: 1255, SEQ ID NO: 1412, and SEQ ID NO: 1569, respectively; and
[3455] clvii. SEQ ID NO: 785, SEQ ID NO: 942, SEQ ID NO: 1099, SEQ ID NO: 1256, SEQ ID NO: 1413, and SEQ ID NO: 1570, respectively, preferably wherein the CDRL1, the CDRL2, the CDRL3, the CDRH1, the CDRH2, and the CDRH3 comprise the amino acid sequences of SEQ ID NO: 702, SEQ ID NO: 859, SEQ ID NO: 1016, SEQ ID NO: 1173, SEQ ID NO: 1330, and SEQ ID NO: 1487, respectively.

[3456] F194. The molecule of any one of F119-F125 or F129-F193, wherein the antibody comprises a light chain variable region and a heavy chain variable region, wherein the light chain variable region and the heavy chain variable region comprise amino acid sequences selected from:
[3457] i. SEQ ID NO: 1 and SEQ ID NO: 158, respectively;
[3458] ii. SEQ ID NO: 2 and SEQ ID NO: 159, respectively;
[3459] iii. SEQ ID NO: 3 and SEQ ID NO: 160, respectively;
[3460] iv. SEQ ID NO: 4 and SEQ ID NO: 161, respectively;
[3461] v. SEQ ID NO: 5 and SEQ ID NO: 162, respectively;
[3462] vi. SEQ ID NO: 6 and SEQ ID NO: 163, respectively;
[3463] vii. SEQ ID NO: 7 and SEQ ID NO: 164, respectively;
[3464] viii. SEQ ID NO: 8 and SEQ ID NO: 165, respectively;
[3465] ix. SEQ ID NO: 9 and SEQ ID NO: 166, respectively;
[3466] x. SEQ ID NO: 10 and SEQ ID NO: 167, respectively;
[3467] xi. SEQ ID NO: 11 and SEQ ID NO: 168, respectively;
[3468] xii. SEQ ID NO: 12 and SEQ ID NO: 169, respectively;
[3469] xiii. SEQ ID NO: 13 and SEQ ID NO: 170, respectively;
[3470] xiv. SEQ ID NO: 14 and SEQ ID NO: 171, respectively;
[3471] xv. SEQ ID NO: 15 and SEQ ID NO: 172, respectively;
[3472] xvi. SEQ ID NO: 16 and SEQ ID NO: 173, respectively;
[3473] xvii. SEQ ID NO: 17 and SEQ ID NO: 174, respectively;
[3474] xviii. SEQ ID NO: 18 and SEQ ID NO: 175, respectively;
[3475] xix. SEQ ID NO: 19 and SEQ ID NO: 176, respectively;
[3476] xx. SEQ ID NO: 20 and SEQ ID NO: 177, respectively;
[3477] xxi. SEQ ID NO: 21 and SEQ ID NO: 178, respectively;
[3478] xxii. SEQ ID NO: 22 and SEQ ID NO: 179, respectively;
[3479] xxiii. SEQ ID NO: 23 and SEQ ID NO: 180, respectively;
[3480] xxiv. SEQ ID NO: 24 and SEQ ID NO: 181, respectively;
[3481] xxv. SEQ ID NO: 25 and SEQ ID NO: 182, respectively;
[3482] xxvi. SEQ ID NO: 26 and SEQ ID NO: 183, respectively;
[3483] xxvii. SEQ ID NO: 27 and SEQ ID NO: 184, respectively;
[3484] xxviii. SEQ ID NO: 28 and SEQ ID NO: 185, respectively;
[3485] xxix. SEQ ID NO: 29 and SEQ ID NO: 186, respectively;
[3486] xxx. SEQ ID NO: 30 and SEQ ID NO: 187, respectively;
[3487] xxxi. SEQ ID NO: 31 and SEQ ID NO: 188, respectively;
[3488] xxxii. SEQ ID NO: 32 and SEQ ID NO: 189, respectively;
[3489] xxxiii. SEQ ID NO: 33 and SEQ ID NO: 190, respectively;
[3490] xxxiv. SEQ ID NO: 34 and SEQ ID NO: 191, respectively;
[3491] xxxv. SEQ ID NO: 35 and SEQ ID NO: 192, respectively;
[3492] xxxvi. SEQ ID NO: 36 and SEQ ID NO: 193, respectively;
[3493] xxxvii. SEQ ID NO: 37 and SEQ ID NO: 194, respectively;
[3494] xxxviii. SEQ ID NO: 38 and SEQ ID NO: 195, respectively;
[3495] xxxix. SEQ ID NO: 39 and SEQ ID NO: 196, respectively;
[3496] xl. SEQ ID NO: 40 and SEQ ID NO: 197, respectively;
[3497] xli. SEQ ID NO: 41 and SEQ ID NO: 198, respectively;
[3498] xlii. SEQ ID NO: 42 and SEQ ID NO: 199, respectively;
[3499] xliii. SEQ ID NO: 43 and SEQ ID NO: 200, respectively;
[3500] xliv. SEQ ID NO: 44 and SEQ ID NO: 201, respectively;
[3501] xlv. SEQ ID NO: 45 and SEQ ID NO: 202, respectively;
[3502] xlvi. SEQ ID NO: 46 and SEQ ID NO: 203, respectively;
[3503] xlvii. SEQ ID NO: 47 and SEQ ID NO: 204, respectively;
[3504] xlviii. SEQ ID NO: 48 and SEQ ID NO: 205, respectively;
[3505] xlix. SEQ ID NO: 49 and SEQ ID NO: 206, respectively;
[3506] l. SEQ ID NO: 50 and SEQ ID NO: 207, respectively;
[3507] li. SEQ ID NO: 51 and SEQ ID NO: 208, respectively;
[3508] lii. SEQ ID NO: 52 and SEQ ID NO: 209, respectively;
[3509] liii. SEQ ID NO: 53 and SEQ ID NO: 210, respectively;
[3510] liv. SEQ ID NO: 54 and SEQ ID NO: 211, respectively;
[3511] lv. SEQ ID NO: 55 and SEQ ID NO: 212, respectively;
[3512] lvi. SEQ ID NO: 56 and SEQ ID NO: 213, respectively;
[3513] lvii. SEQ ID NO: 57 and SEQ ID NO: 214, respectively;
[3514] lviii. SEQ ID NO: 58 and SEQ ID NO: 215, respectively;
[3515] lix. SEQ ID NO: 59 and SEQ ID NO: 216, respectively;
[3516] lx. SEQ ID NO: 60 and SEQ ID NO: 217, respectively;
[3517] lxi. SEQ ID NO: 61 and SEQ ID NO: 218, respectively;
[3518] lxii. SEQ ID NO: 62 and SEQ ID NO: 219, respectively;
[3519] lxiii. SEQ ID NO: 63 and SEQ ID NO: 220, respectively;
[3520] lxiv. SEQ ID NO: 64 and SEQ ID NO: 221, respectively;
[3521] lxv. SEQ ID NO: 65 and SEQ ID NO: 222, respectively;
[3522] lxvi. SEQ ID NO: 66 and SEQ ID NO: 223, respectively;
[3523] lxvii. SEQ ID NO: 67 and SEQ ID NO: 224, respectively;
[3524] lxviii. SEQ ID NO: 68 and SEQ ID NO: 225, respectively;
[3525] lxix. SEQ ID NO: 69 and SEQ ID NO: 226, respectively;
[3526] lxx. SEQ ID NO: 70 and SEQ ID NO: 227, respectively;
[3527] lxxi. SEQ ID NO: 71 and SEQ ID NO: 228, respectively;
[3528] lxxii. SEQ ID NO: 72 and SEQ ID NO: 229, respectively;
[3529] lxxiii. SEQ ID NO: 73 and SEQ ID NO: 230, respectively;
[3530] lxxiv. SEQ ID NO: 74 and SEQ ID NO: 231, respectively;
[3531] lxxv. SEQ ID NO: 75 and SEQ ID NO: 232, respectively;
[3532] lxxvi. SEQ ID NO: 76 and SEQ ID NO: 233, respectively;
[3533] lxxvii. SEQ ID NO: 77 and SEQ ID NO: 234, respectively;
[3534] lxxviii. SEQ ID NO: 78 and SEQ ID NO: 235, respectively;
[3535] lxxix. SEQ ID NO: 79 and SEQ ID NO: 236, respectively;
[3536] lxxx. SEQ ID NO: 80 and SEQ ID NO: 237, respectively;
[3537] lxxxi. SEQ ID NO: 81 and SEQ ID NO: 238, respectively;
[3538] lxxxii. SEQ ID NO: 82 and SEQ ID NO: 239, respectively;
[3539] lxxxiii. SEQ ID NO: 83 and SEQ ID NO: 240, respectively;
[3540] lxxxiv. SEQ ID NO: 84 and SEQ ID NO: 241, respectively;
[3541] lxxxv. SEQ ID NO: 85 and SEQ ID NO: 242, respectively;
[3542] lxxxvi. SEQ ID NO: 86 and SEQ ID NO: 243, respectively;
[3543] lxxxvii. SEQ ID NO: 87 and SEQ ID NO: 244, respectively;
[3544] lxxxviii. SEQ ID NO: 88 and SEQ ID NO: 245, respectively;
[3545] lxxxix. SEQ ID NO: 89 and SEQ ID NO: 246, respectively;
[3546] xc. SEQ ID NO: 90 and SEQ ID NO: 247, respectively;
[3547] xci. SEQ ID NO: 91 and SEQ ID NO: 248, respectively;
[3548] xcii. SEQ ID NO: 92 and SEQ ID NO: 249, respectively;
[3549] xciii. SEQ ID NO: 93 and SEQ ID NO: 250, respectively;
[3550] xciv. SEQ ID NO: 94 and SEQ ID NO: 251, respectively;
[3551] xcv. SEQ ID NO: 95 and SEQ ID NO: 252, respectively;
[3552] xcvi. SEQ ID NO: 96 and SEQ ID NO: 253, respectively;
[3553] xcvii. SEQ ID NO: 97 and SEQ ID NO: 254, respectively;
[3554] xcviii. SEQ ID NO: 98 and SEQ ID NO: 255, respectively;
[3555] xcix. SEQ ID NO: 99 and SEQ ID NO: 256, respectively;
[3556] c. SEQ ID NO: 100 and SEQ ID NO: 257, respectively;
[3557] ci. SEQ ID NO: 101 and SEQ ID NO: 258, respectively;
[3558] cii. SEQ ID NO: 102 and SEQ ID NO: 259, respectively;
[3559] ciii. SEQ ID NO: 103 and SEQ ID NO: 260, respectively;
[3560] civ. SEQ ID NO: 104 and SEQ ID NO: 261, respectively;
[3561] cv. SEQ ID NO: 105 and SEQ ID NO: 262, respectively;
[3562] cvi. SEQ ID NO: 106 and SEQ ID NO: 263, respectively;
[3563] cvii. SEQ ID NO: 107 and SEQ ID NO: 264, respectively;
[3564] cviii. SEQ ID NO: 108 and SEQ ID NO: 265, respectively;
[3565] cix. SEQ ID NO: 109 and SEQ ID NO: 266, respectively;
[3566] cx. SEQ ID NO: 110 and SEQ ID NO: 267, respectively;
[3567] cxi. SEQ ID NO: 111 and SEQ ID NO: 268, respectively;
[3568] cxii. SEQ ID NO: 112 and SEQ ID NO: 269, respectively;
[3569] cxiii. SEQ ID NO: 113 and SEQ ID NO: 270, respectively;
[3570] cxiv. SEQ ID NO: 114 and SEQ ID NO: 271, respectively;
[3571] cxv. SEQ ID NO: 115 and SEQ ID NO: 272, respectively;
[3572] cxvi. SEQ ID NO: 116 and SEQ ID NO: 273, respectively;
[3573] cxvii. SEQ ID NO: 117 and SEQ ID NO: 274, respectively;
[3574] cxviii. SEQ ID NO: 118 and SEQ ID NO: 275, respectively;
[3575] cxix. SEQ ID NO: 119 and SEQ ID NO: 276, respectively;
[3576] cxx. SEQ ID NO: 120 and SEQ ID NO: 277, respectively;
[3577] cxxi. SEQ ID NO: 121 and SEQ ID NO: 278, respectively;
[3578] cxxii. SEQ ID NO: 122 and SEQ ID NO: 279, respectively;
[3579] cxxiii. SEQ ID NO: 123 and SEQ ID NO: 280, respectively;
[3580] cxxiv. SEQ ID NO: 124 and SEQ ID NO: 281, respectively;
[3581] cxxv. SEQ ID NO: 125 and SEQ ID NO: 282, respectively;
[3582] cxxvi. SEQ ID NO: 126 and SEQ ID NO: 283, respectively;
[3583] cxxvii. SEQ ID NO: 127 and SEQ ID NO: 284, respectively;
[3584] cxxviii. SEQ ID NO: 128 and SEQ ID NO: 285, respectively;
[3585] cxxix. SEQ ID NO: 129 and SEQ ID NO: 286, respectively;
[3586] cxxx. SEQ ID NO: 130 and SEQ ID NO: 287, respectively;
[3587] cxxxi. SEQ ID NO: 131 and SEQ ID NO: 288, respectively;
[3588] cxxxii. SEQ ID NO: 132 and SEQ ID NO: 289, respectively;
[3589] cxxxiii. SEQ ID NO: 133 and SEQ ID NO: 290, respectively;
[3590] cxxxiv. SEQ ID NO: 134 and SEQ ID NO: 291, respectively;
[3591] cxxxv. SEQ ID NO: 135 and SEQ ID NO: 292, respectively;
[3592] cxxxvi. SEQ ID NO: 136 and SEQ ID NO: 293, respectively;
[3593] cxxxvii. SEQ ID NO: 137 and SEQ ID NO: 294, respectively;
[3594] cxxxviii. SEQ ID NO: 138 and SEQ ID NO: 295, respectively;
[3595] cxxxix. SEQ ID NO: 139 and SEQ ID NO: 296, respectively;
[3596] cxl. SEQ ID NO: 140 and SEQ ID NO: 297, respectively;
[3597] cxli. SEQ ID NO: 141 and SEQ ID NO: 298, respectively;
[3598] cxlii. SEQ ID NO: 142 and SEQ ID NO: 299, respectively;
[3599] cxliii. SEQ ID NO: 143 and SEQ ID NO: 300, respectively;
[3600] cxliv. SEQ ID NO: 144 and SEQ ID NO: 301, respectively;
[3601] cxlv. SEQ ID NO: 145 and SEQ ID NO: 302, respectively;
[3602] cxlvi. SEQ ID NO: 146 and SEQ ID NO: 303, respectively;
[3603] cxlvii. SEQ ID NO: 147 and SEQ ID NO: 304, respectively;
[3604] cxlviii. SEQ ID NO: 148 and SEQ ID NO: 305, respectively;
[3605] cxlix. SEQ ID NO: 149 and SEQ ID NO: 306, respectively;
[3606] cl. SEQ ID NO: 150 and SEQ ID NO: 307, respectively;
[3607] cli. SEQ ID NO: 151 and SEQ ID NO: 308, respectively;
[3608] clii. SEQ ID NO: 152 and SEQ ID NO: 309, respectively;
[3609] cliii. SEQ ID NO: 153 and SEQ ID NO: 310, respectively;
[3610] cliv. SEQ ID NO: 154 and SEQ ID NO: 311, respectively;
[3611] clv. SEQ ID NO: 155 and SEQ ID NO: 312, respectively;
[3612] clvi. SEQ ID NO: 156 and SEQ ID NO: 313, respectively; and
[3613] clvii. SEQ ID NO: 157 and SEQ ID NO: 314, respectively,
[3614] preferably wherein the light chain variable region and the heavy chain variable region comprise the amino acid sequences of SEQ ID NO: 74 and SEQ ID NO: 231, respectively.

[3615] F195. The molecule of any one of F119-F125 or F129-F194, wherein the antibody comprises a light chain and a heavy chain, wherein the light chain and heavy chain comprise amino acid sequences selected from:
[3616] i. SEQ ID NO: 315 and SEQ ID NO: 472, respectively;
[3617] ii. SEQ ID NO: 316 and SEQ ID NO: 473, respectively;
[3618] iii. SEQ ID NO: 317 and SEQ ID NO: 474, respectively;
[3619] iv. SEQ ID NO: 318 and SEQ ID NO: 475, respectively;
[3620] v. SEQ ID NO: 319 and SEQ ID NO: 476, respectively;
[3621] vi. SEQ ID NO: 320 and SEQ ID NO: 477, respectively;
[3622] vii. SEQ ID NO: 321 and SEQ ID NO: 478, respectively;
[3623] viii. SEQ ID NO: 322 and SEQ ID NO: 479, respectively;
[3624] ix. SEQ ID NO: 323 and SEQ ID NO: 480, respectively;
[3625] x. SEQ ID NO: 324 and SEQ ID NO: 481, respectively;
[3626] xi. SEQ ID NO: 325 and SEQ ID NO: 482, respectively;
[3627] xii. SEQ ID NO: 326 and SEQ ID NO: 483, respectively;
[3628] xiii. SEQ ID NO: 327 and SEQ ID NO: 484, respectively;
[3629] xiv. SEQ ID NO: 328 and SEQ ID NO: 485, respectively;
[3630] xv. SEQ ID NO: 329 and SEQ ID NO: 486, respectively;
[3631] xvi. SEQ ID NO: 330 and SEQ ID NO: 487, respectively;
[3632] xvii. SEQ ID NO: 331 and SEQ ID NO: 488, respectively;
[3633] xviii. SEQ ID NO: 332 and SEQ ID NO: 489, respectively;
[3634] xix. SEQ ID NO: 333 and SEQ ID NO: 490, respectively;
[3635] xx. SEQ ID NO: 334 and SEQ ID NO: 491, respectively;
[3636] xxi. SEQ ID NO: 335 and SEQ ID NO: 492, respectively;
[3637] xxii. SEQ ID NO: 336 and SEQ ID NO: 493, respectively;
[3638] xxiii. SEQ ID NO: 337 and SEQ ID NO: 494, respectively;
[3639] xxiv. SEQ ID NO: 338 and SEQ ID NO: 495, respectively;
[3640] xxv. SEQ ID NO: 339 and SEQ ID NO: 496, respectively;
[3641] xxvi. SEQ ID NO: 340 and SEQ ID NO: 497, respectively;
[3642] xxvii. SEQ ID NO: 341 and SEQ ID NO: 498, respectively;
[3643] xxviii. SEQ ID NO: 342 and SEQ ID NO: 499, respectively;
[3644] xxix. SEQ ID NO: 343 and SEQ ID NO: 500, respectively;
[3645] xxx. SEQ ID NO: 344 and SEQ ID NO: 501, respectively;
[3646] xxxi. SEQ ID NO: 345 and SEQ ID NO: 502, respectively;
[3647] xxxii. SEQ ID NO: 346 and SEQ ID NO: 503, respectively;
[3648] xxxiii. SEQ ID NO: 347 and SEQ ID NO: 504, respectively;
[3649] xxxiv. SEQ ID NO: 348 and SEQ ID NO: 505, respectively;
[3650] xxxv. SEQ ID NO: 349 and SEQ ID NO: 506, respectively;
[3651] xxxvi. SEQ ID NO: 350 and SEQ ID NO: 507, respectively;
[3652] xxxvii. SEQ ID NO: 351 and SEQ ID NO: 508, respectively;
[3653] xxxviii. SEQ ID NO: 352 and SEQ ID NO: 509, respectively;
[3654] xxxix. SEQ ID NO: 353 and SEQ ID NO: 510, respectively;
[3655] xl. SEQ ID NO: 354 and SEQ ID NO: 511, respectively;
[3656] xli. SEQ ID NO: 355 and SEQ ID NO: 512, respectively;
[3657] xlii. SEQ ID NO: 356 and SEQ ID NO: 513, respectively;
[3658] xliii. SEQ ID NO: 357 and SEQ ID NO: 514, respectively;
[3659] xliv. SEQ ID NO: 358 and SEQ ID NO: 515, respectively;
[3660] xlv. SEQ ID NO: 359 and SEQ ID NO: 516, respectively;
[3661] xlvi. SEQ ID NO: 360 and SEQ ID NO: 517, respectively;
[3662] xlvii. SEQ ID NO: 361 and SEQ ID NO: 518, respectively;
[3663] xlviii. SEQ ID NO: 362 and SEQ ID NO: 519, respectively;
[3664] xlix. SEQ ID NO: 363 and SEQ ID NO: 520, respectively;
[3665] l. SEQ ID NO: 364 and SEQ ID NO: 521, respectively;
[3666] li. SEQ ID NO: 365 and SEQ ID NO: 522, respectively;
[3667] lii. SEQ ID NO: 366 and SEQ ID NO: 523, respectively;
[3668] liii. SEQ ID NO: 367 and SEQ ID NO: 524, respectively;
[3669] liv. SEQ ID NO: 368 and SEQ ID NO: 525, respectively;
[3670] lv. SEQ ID NO: 369 and SEQ ID NO: 526, respectively;
[3671] lvi. SEQ ID NO: 370 and SEQ ID NO: 527, respectively;
[3672] lvii. SEQ ID NO: 371 and SEQ ID NO: 528, respectively;
[3673] lviii. SEQ ID NO: 372 and SEQ ID NO: 529, respectively;
[3674] lix. SEQ ID NO: 373 and SEQ ID NO: 530, respectively;
[3675] lx. SEQ ID NO: 374 and SEQ ID NO: 531, respectively;
[3676] lxi. SEQ ID NO: 375 and SEQ ID NO: 532, respectively;
[3677] lxii. SEQ ID NO: 376 and SEQ ID NO: 533, respectively;
[3678] lxiii. SEQ ID NO: 377 and SEQ ID NO: 534, respectively;
[3679] lxiv. SEQ ID NO: 378 and SEQ ID NO: 535, respectively;
[3680] lxv. SEQ ID NO: 379 and SEQ ID NO: 536, respectively;
[3681] lxvi. SEQ ID NO: 380 and SEQ ID NO: 537, respectively;
[3682] lxvii. SEQ ID NO: 381 and SEQ ID NO: 538, respectively;
[3683] lxviii. SEQ ID NO: 382 and SEQ ID NO: 539, respectively;
[3684] lxix. SEQ ID NO: 383 and SEQ ID NO: 540, respectively;
[3685] lxx. SEQ ID NO: 384 and SEQ ID NO: 541, respectively;
[3686] lxxi. SEQ ID NO: 385 and SEQ ID NO: 542, respectively;
[3687] lxxii. SEQ ID NO: 386 and SEQ ID NO: 543, respectively;
[3688] lxxiii. SEQ ID NO: 387 and SEQ ID NO: 544, respectively;
[3689] lxxiv. SEQ ID NO: 388 and SEQ ID NO: 545, respectively;
[3690] lxxv. SEQ ID NO: 389 and SEQ ID NO: 546, respectively;
[3691] lxxvi. SEQ ID NO: 390 and SEQ ID NO: 547, respectively;
[3692] lxxvii. SEQ ID NO: 391 and SEQ ID NO: 548, respectively;
[3693] lxxviii. SEQ ID NO: 392 and SEQ ID NO: 549, respectively;
[3694] lxxix. SEQ ID NO: 393 and SEQ ID NO: 550, respectively;
[3695] lxxx. SEQ ID NO: 394 and SEQ ID NO: 551, respectively;
[3696] lxxxi. SEQ ID NO: 395 and SEQ ID NO: 552, respectively;
[3697] lxxxii. SEQ ID NO: 396 and SEQ ID NO: 553, respectively;
[3698] lxxxiii. SEQ ID NO: 397 and SEQ ID NO: 554, respectively;
[3699] lxxxiv. SEQ ID NO: 398 and SEQ ID NO: 555, respectively;
[3700] lxxxv. SEQ ID NO: 399 and SEQ ID NO: 556, respectively;
[3701] lxxxvi. SEQ ID NO: 400 and SEQ ID NO: 557, respectively;
[3702] lxxxvii. SEQ ID NO: 401 and SEQ ID NO: 558, respectively;
[3703] lxxxviii. SEQ ID NO: 402 and SEQ ID NO: 559, respectively;
[3704] lxxxix. SEQ ID NO: 403 and SEQ ID NO: 560, respectively;
[3705] xc. SEQ ID NO: 404 and SEQ ID NO: 561, respectively;
[3706] xci. SEQ ID NO: 405 and SEQ ID NO: 562, respectively;
[3707] xcii. SEQ ID NO: 406 and SEQ ID NO: 563, respectively;
[3708] xciii. SEQ ID NO: 407 and SEQ ID NO: 564, respectively;
[3709] xciv. SEQ ID NO: 408 and SEQ ID NO: 565, respectively;
[3710] xcv. SEQ ID NO: 409 and SEQ ID NO: 566, respectively;
[3711] xcvi. SEQ ID NO: 410 and SEQ ID NO: 567, respectively;
[3712] xcvii. SEQ ID NO: 411 and SEQ ID NO: 568, respectively;
[3713] xcviii. SEQ ID NO: 412 and SEQ ID NO: 569, respectively;
[3714] xcix. SEQ ID NO: 413 and SEQ ID NO: 570, respectively;
[3715] c. SEQ ID NO: 414 and SEQ ID NO: 571, respectively;
[3716] ci. SEQ ID NO: 415 and SEQ ID NO: 572, respectively;
[3717] cii. SEQ ID NO: 416 and SEQ ID NO: 573, respectively;
[3718] ciii. SEQ ID NO: 417 and SEQ ID NO: 574, respectively;
[3719] civ. SEQ ID NO: 418 and SEQ ID NO: 575, respectively;
[3720] cv. SEQ ID NO: 419 and SEQ ID NO: 576, respectively;
[3721] cvi. SEQ ID NO: 420 and SEQ ID NO: 577, respectively;
[3722] cvii. SEQ ID NO: 421 and SEQ ID NO: 578, respectively;
[3723] cviii. SEQ ID NO: 422 and SEQ ID NO: 579, respectively;
[3724] cix. SEQ ID NO: 423 and SEQ ID NO: 580, respectively;
[3725] cx. SEQ ID NO: 424 and SEQ ID NO: 581, respectively;
[3726] cxi. SEQ ID NO: 425 and SEQ ID NO: 582, respectively;
[3727] cxii. SEQ ID NO: 426 and SEQ ID NO: 583, respectively;
[3728] cxiii. SEQ ID NO: 427 and SEQ ID NO: 584, respectively;
[3729] cxiv. SEQ ID NO: 428 and SEQ ID NO: 585, respectively;
[3730] cxv. SEQ ID NO: 429 and SEQ ID NO: 586, respectively;
[3731] cxvi. SEQ ID NO: 430 and SEQ ID NO: 587, respectively;
[3732] cxvii. SEQ ID NO: 431 and SEQ ID NO: 588, respectively;
[3733] cxviii. SEQ ID NO: 432 and SEQ ID NO: 589, respectively;
[3734] cxix. SEQ ID NO: 433 and SEQ ID NO: 590, respectively;
[3735] cxx. SEQ ID NO: 434 and SEQ ID NO: 591, respectively;
[3736] cxxi. SEQ ID NO: 435 and SEQ ID NO: 592, respectively;
[3737] cxxii. SEQ ID NO: 436 and SEQ ID NO: 593, respectively;
[3738] cxxiii. SEQ ID NO: 437 and SEQ ID NO: 594, respectively;
[3739] cxxiv. SEQ ID NO: 438 and SEQ ID NO: 595, respectively;
[3740] cxxv. SEQ ID NO: 439 and SEQ ID NO: 596, respectively;
[3741] cxxvi. SEQ ID NO: 440 and SEQ ID NO: 597, respectively;
[3742] cxxvii. SEQ ID NO: 441 and SEQ ID NO: 598, respectively;
[3743] cxxviii. SEQ ID NO: 442 and SEQ ID NO: 599, respectively;
[3744] cxxix. SEQ ID NO: 443 and SEQ ID NO: 600, respectively;
[3745] cxxx. SEQ ID NO: 444 and SEQ ID NO: 601, respectively;
[3746] cxxxi. SEQ ID NO: 445 and SEQ ID NO: 602, respectively;
[3747] cxxxii. SEQ ID NO: 446 and SEQ ID NO: 603, respectively;
[3748] cxxxiii. SEQ ID NO: 447 and SEQ ID NO: 604, respectively;
[3749] cxxxiv. SEQ ID NO: 448 and SEQ ID NO: 605, respectively;
[3750] cxxxv. SEQ ID NO: 449 and SEQ ID NO: 606, respectively;
[3751] cxxxvi. SEQ ID NO: 450 and SEQ ID NO: 607, respectively;
[3752] cxxxvii. SEQ ID NO: 451 and SEQ ID NO: 608, respectively;
[3753] cxxxviii. SEQ ID NO: 452 and SEQ ID NO: 609, respectively;
[3754] cxxxix. SEQ ID NO: 453 and SEQ ID NO: 610, respectively;
[3755] cxl. SEQ ID NO: 454 and SEQ ID NO: 611, respectively;
[3756] cxli. SEQ ID NO: 455 and SEQ ID NO: 612, respectively;
[3757] cxlii. SEQ ID NO: 456 and SEQ ID NO: 613, respectively;
[3758] cxliii. SEQ ID NO: 457 and SEQ ID NO: 614, respectively;
[3759] cxliv. SEQ ID NO: 458 and SEQ ID NO: 615, respectively;
[3760] cxlv. SEQ ID NO: 459 and SEQ ID NO: 616, respectively;
[3761] cxlvi. SEQ ID NO: 460 and SEQ ID NO: 617, respectively;
[3762] cxlvii. SEQ ID NO: 461 and SEQ ID NO: 618, respectively;
[3763] cxlviii. SEQ ID NO: 462 and SEQ ID NO: 619, respectively;
[3764] cxlix. SEQ ID NO: 463 and SEQ ID NO: 620, respectively;
[3765] cl. SEQ ID NO: 464 and SEQ ID NO: 621, respectively;
[3766] cli. SEQ ID NO: 465 and SEQ ID NO: 622, respectively;
[3767] clii. SEQ ID NO: 466 and SEQ ID NO: 623, respectively;
[3768] cliii. SEQ ID NO: 467 and SEQ ID NO: 624, respectively;
[3769] cliv. SEQ ID NO: 468 and SEQ ID NO: 625, respectively;
[3770] clv. SEQ ID NO: 469 and SEQ ID NO: 626, respectively;
[3771] clvi. SEQ ID NO: 470 and SEQ ID NO: 627, respectively; and
[3772] clvii. SEQ ID NO: 471 and SEQ ID NO: 628, respectively,
[3773] wherein the antibody comprises one or more cysteine amino acid substitution(s) at one or more position(s) selected from 88 of the light chain, 384 of the heavy chain, or 487 of the heavy chain, according to AHo numbering.

[3774] F196. The molecule of F195, wherein:
[3775] the light chain comprises the amino acid sequence of SEQ ID NO: 388 and the heavy chain comprises the amino acid sequence of SEQ ID NO: 1571; or
[3776] the light chain comprises the amino acid sequence of SEQ ID NO: 455 and the heavy chain comprises the amino acid sequence of SEQ ID NO: 1572; or
[3777] the light chain comprises the amino acid sequence of SEQ ID NO: 389 and the heavy chain comprises the amino acid sequence of SEQ ID NO: 1573; or
[3778] the light chain comprises the amino acid sequence of SEQ ID NO: 455 and the heavy chain comprises the amino acid sequence of SEQ ID NO: 1574; or
[3779] the light chain comprises the amino acid sequence of SEQ ID NO: 1575 and the heavy chain comprises the amino acid sequence of SEQ ID NO: 612,
[3780] preferably wherein the light chain comprises the amino acid sequence of SEQ ID NO: 388 and the heavy chain comprises the amino acid sequence of SEQ ID NO: 1571.

[3781] F197. A molecule of F195 or F196, wherein the light chain comprises the amino acid sequence of SEQ ID NO: 388 and the heavy chain comprises the amino acid sequence of SEQ ID NO: 1571.

[3782] F198. A molecule comprising:
[3783] a first polypeptide that agonizes a glucagon receptor (“GCGR”);
[3784] a first linker polypeptide;
[3785] an antibody that specifically binds to a glucose-dependent insulinotropic polypeptide receptor (“GIPR”);
[3786] a second linker polypeptide; and
[3787] a second polypeptide that agonizes a GCGR,
[3788] wherein:
   [3789] an ε-amino group of a lysine residue of the first polypeptide is covalently linked to a C-terminus of the first linker polypeptide;
   [3790] an N-terminus of the first linker polypeptide is conjugated to a cysteine residue of the antibody;
   [3791] an ε-amino group of a lysine residue of the second polypeptide is covalently linked to a C-terminus of the second linker polypeptide; and
   [3792] an N-terminus of the second linker polypeptide is conjugated to a cysteine residue of the antibody.

[3793] F199. A molecule comprising:
[3794] a first polypeptide that agonizes a glucagon receptor (“GCGR”);
[3795] a first linker polypeptide;
[3796] an antibody that specifically binds to a glucose-dependent insulinotropic polypeptide receptor (“GIPR”);
[3797] a second linker polypeptide; and
[3798] a second polypeptide that agonizes a GCGR,
[3799] wherein:
   [3800] a C-terminal amino acid residue of the first polypeptide is covalently linked to a N-terminal amino acid residue of the first linker polypeptide;
   [3801] a C-terminal amino acid residue of the first linker polypeptide is conjugated to a cysteine residue of the antibody;
   [3802] a C-terminal amino acid residue of the second polypeptide is covalently linked to a N-terminal amino acid residue of the second linker polypeptide; and
   [3803] a C-terminal amino acid of the second linker polypeptide is conjugated to a cysteine residue of the antibody.

[3804] F200. The molecule of F198 or F199, wherein each of the first linker polypeptide and the second linker polypeptide independently comprises the amino acid sequence of any one of SEQ ID NOs: 1628-1683, 1739-1746, or 1841-1852.

[3805] F201. The molecule of any one of F198-F200, wherein each of the first linker polypeptide and the second linker polypeptide independently comprises the amino acid sequence of any one of SEQ ID NOs: 1628-1683, preferably SEQ ID NOs: 1628-1630, preferably SEQ ID NO: 1628.

[3806] F202. The molecule of any one of F198-F201, wherein each of the first polypeptide and the second polypeptide independently comprises glucagon or a glucagon analog.

[3807] F203. The molecule of any one of F198-F202, wherein each of the first polypeptide and the second polypeptide is independently selected from the polypeptides of any one of F1-F55.

[3808] F204. The molecule of any one of F198-F203, wherein each of the first polypeptide and the second polypeptide independently comprises the amino acid sequence of any one of SEQ ID NOs: 1587-1627, 1747-1840, 1859-1862, or 1879-1881.

[3809] F205. The molecule of any one of F198-F204, wherein each of the first polypeptide and the second polypeptide independently comprises the amino acid sequence of any one of SEQ ID NOs: 1587-1627 or 1747.

[3810] F206. The molecule of any one of F198-F203, wherein each of the first polypeptide and the second polypeptide independently comprises the amino acid sequence of any one of SEQ ID NOs: 1626, 1818, 1822, 1825, or 1826.

[3811] F207. The molecule of F198-F205, wherein each of the first polypeptide and the second polypeptide independently comprises the amino acid sequence of any one of SEQ ID NOs: 1587, 1592, 1596, 1615, and 1626.

[3812] F208. The molecule of any one of F198-F207, wherein the first polypeptide has the same amino acid sequence as the second polypeptide.

[3813] F209. The molecule of any one of F198-F208, wherein the first linker polypeptide has the same amino acid sequence as the second linker polypeptide.

[3814] F210. The molecule of any one of F198-F209, wherein: the first polypeptide has the same amino acid sequence as the second polypeptide; and the first linker polypeptide has the same amino acid sequence as the second linker polypeptide.

[3815] F211. The molecule of any one of F198 or F200-F210, wherein the lysine residue of the first polypeptide comprising the ε-amino group that is covalently linked to the C-terminus of the first linker polypeptide is at position 24 or position 28.

[3816] F212. The molecule of any one of F198 or F200-F211, wherein the lysine residue of the second polypeptide comprising the ε-amino group that is covalently linked to the C-terminus of the second linker polypeptide is at position 24 or position 28.

[3817] F213. The molecule of any one of F198 or F200-F212, wherein: the lysine residue of the first polypeptide comprising the ε-amino group that is covalently linked to the C-terminus of the first linker polypeptide is at position 28; and the lysine residue of the second polypeptide comprising the ε-amino group that is covalently linked to the C-terminus of the second linker polypeptide is at position 28.

[3818] F214. The molecule of any one of F198-F213, wherein the cysteine residues of the antibody that are conjugated to the first linker polypeptide and the second linker polypeptide are at positions selected from the group consisting of 88 of both light chains, 384 of both heavy chains, and 487 of both heavy chains, according to AHo numbering.

[3819] F215. The molecule of any one of F198-F214, wherein the cysteine residues of the antibody that are conjugated to the first linker polypeptide and the second linker polypeptide are at positions 384 of both heavy chains, according to AHo numbering.

[3820] F216. The molecule of any one of F198 or F200-F215, wherein:
[3821] the lysine residue of the first polypeptide comprising the ε-amino group that is covalently linked to the C-terminus of the first linker polypeptide is at position 28;
[3822] the lysine residue of the second polypeptide comprising the ε-amino group that is covalently linked to the C-terminus of the second linker polypeptide is at position 28; and
[3823] the cysteine residues of the antibody that are conjugated to the N-termini of the first linker polypeptide and the second linker polypeptide are at positions 384 of both heavy chains, according to AHo numbering.

[3824] F217. The molecule of any one of F198-F216, wherein the antibody comprises a CDRL1, a CDRL2, a CDRL3, a CDRH1, a CDRH2, and a CDRH3, wherein the CDRL1, the CDRL2, the CDRL3, the CDRH1, the CDRH2, and the CDRH3 comprise the amino acid sequences of SEQ ID NO: 702, SEQ ID NO: 859, SEQ ID NO: 1016, SEQ ID NO: 1173, SEQ ID NO: 1330, and SEQ ID NO: 1487, respectively.

[3825] F218. The molecule of any one of F198-F217, wherein the antibody comprises a light chain variable region comprising the amino acid sequence of SEQ ID NO: 74 and a heavy chain variable region comprising the amino acid sequence of SEQ ID NO: 231.

[3826] F219. The molecule of any one of F198-F218, wherein the antibody comprises a light chain comprising the amino acid sequence of SEQ ID NO: 388 and a heavy chain comprising the amino acid sequence of SEQ ID NO: 1571.

[3827] F220. A molecule comprising:
[3828] a polypeptide that agonizes a glucagon receptor (“GCGR”) comprising the amino acid sequence of SEQ ID NO: 1826;
[3829] a linker polypeptide comprising the amino acid sequence of SEQ ID NO: 1628; and
[3830] an antibody that specifically binds to a glucose-dependent insulinotropic polypeptide receptor (“GIPR”), wherein the antibody comprises a light chain and a heavy chain, wherein the light chain comprises the amino acid sequence of SEQ ID NO: 388 and the heavy chain comprises the amino acid sequence of SEQ ID NO: 1571,
[3831] wherein:
   [3832] an ε-amino group of a lysine residue at position 28 of the polypeptide is covalently linked to a C-terminus of the linker polypeptide; and
   [3833] an N-terminus of the linker polypeptide is conjugated to a cysteine residue at position 275 of the heavy chain of the antibody.

[3834] F221. A molecule comprising:
[3835] a polypeptide that agonizes a glucagon receptor (“GCGR”) comprising the amino acid sequence of SEQ ID NO: 1822;
[3836] a linker polypeptide comprising the amino acid sequence of SEQ ID NO: 1628; and
[3837] an antibody that specifically binds to a glucose-dependent insulinotropic polypeptide receptor (“GIPR”), wherein the antibody comprises a light chain and a heavy chain, wherein the light chain comprises the amino acid sequence of SEQ ID NO: 388 and the heavy chain comprises the amino acid sequence of SEQ ID NO: 1571,
[3838] wherein:
   [3839] an ε-amino group of a lysine residue at position 24 of the polypeptide is covalently linked to a C-terminus of the linker polypeptide; and
   [3840] an N-terminus of the linker polypeptide is conjugated to a cysteine residue at position 275 of the heavy chain of the antibody.

[3841] F222. A molecule comprising:
[3842] a polypeptide that agonizes a glucagon receptor (“GCGR”) comprising the amino acid sequence of SEQ ID NO: 1825;
[3843] a linker polypeptide comprising the amino acid sequence of SEQ ID NO: 1628; and
[3844] an antibody that specifically binds to a glucose-dependent insulinotropic polypeptide receptor (“GIPR”), wherein the antibody comprises a light chain and a heavy chain, wherein the light chain comprises the amino acid sequence of SEQ ID NO: 388 and the heavy chain comprises the amino acid sequence of SEQ ID NO: 1571,
[3845] wherein:
   [3846] an ε-amino group of a lysine residue at position 28 of the polypeptide is covalently linked to a C-terminus of the linker polypeptide; and
   [3847] an N-terminus of the linker polypeptide is conjugated to a cysteine residue at position 275 of the heavy chain of the antibody.

[3848] F223. A molecule comprising:
[3849] a polypeptide that agonizes a glucagon receptor (“GCGR”) comprising the amino acid sequence of SEQ ID NO: 1818;
[3850] a linker polypeptide comprising the amino acid sequence of SEQ ID NO: 1628; and
[3851] an antibody that specifically binds to a glucose-dependent insulinotropic polypeptide receptor (“GIPR”), wherein the antibody comprises a light chain and a heavy chain, wherein the light chain comprises the amino acid sequence of SEQ ID NO: 388 and the heavy chain comprises the amino acid sequence of SEQ ID NO: 1571,
[3852] wherein:
   [3853] an ε-amino group of a lysine residue at position 28 of the polypeptide is covalently linked to a C-terminus of the linker polypeptide; and
   [3854] an N-terminus of the linker polypeptide is conjugated to a cysteine residue at position 275 of the heavy chain of the antibody.

[3855] F224. A molecule comprising:
[3856] a first polypeptide and a second polypeptide that agonize a glucagon receptor (“GCGR”), wherein the first polypeptide and the second polypeptide each comprise the amino acid sequence of SEQ ID NO: 1822;
[3857] a first linker polypeptide and a second linker polypeptide, wherein the first linker polypeptide and the second linker polypeptide each comprise the amino acid sequence of SEQ ID NO: 1628; and
[3858] an antibody that specifically binds to a glucose-dependent insulinotropic polypeptide receptor (“GIPR”), wherein the antibody comprises a first light chain and a second light chain, wherein the first light chain and the second light chain each comprise the amino acid sequence of SEQ ID NO: 388, and a first heavy chain and a second heavy chain, wherein the first heavy chain and the second heavy chain each comprise the amino acid sequence of SEQ ID NO: 1571,
[3859] wherein:
   [3860] an ε-amino group of a lysine residue at position 24 of the first polypeptide is covalently linked to a C-terminus of the first linker polypeptide;
   [3861] an N-terminus of the first linker polypeptide is conjugated to a cysteine residue at position 275 of the first heavy chain of the antibody;
   [3862] an ε-amino group of a lysine residue at position 24 of the second polypeptide is covalently linked to a C-terminus of the second linker polypeptide; and
   [3863] an N-terminus of the second linker polypeptide is conjugated to a cysteine residue at position 275 of the second heavy chain of the antibody.

[3864] F225. A molecule comprising:
[3865] a first polypeptide and a second polypeptide that agonize a glucagon receptor (“GCGR”), wherein the first polypeptide and the second polypeptide each comprise the amino acid sequence of SEQ ID NO: 1825;
[3866] a first linker polypeptide and a second linker polypeptide, wherein the first linker polypeptide and the second linker polypeptide each comprise the amino acid sequence of SEQ ID NO: 1628; and
[3867] an antibody that specifically binds to a glucose-dependent insulinotropic polypeptide receptor (“GIPR”), wherein the antibody comprises a first light chain and a second light chain, wherein the first light chain and the second light chain each comprise the amino acid sequence of SEQ ID NO: 388, and a first heavy chain and a second heavy chain, wherein the first heavy chain and the second heavy chain each comprise the amino acid sequence of SEQ ID NO: 1571,
[3868] wherein:
   [3869] an ε-amino group of a lysine residue at position 28 of the first polypeptide is covalently linked to a C-terminus of the first linker polypeptide;
   [3870] an N-terminus of the first linker polypeptide is conjugated to a cysteine residue at position 275 of the first heavy chain of the antibody;
   [3871] an ε-amino group of a lysine residue at position 28 of the second polypeptide is covalently linked to a C-terminus of the second linker polypeptide; and
   [3872] an N-terminus of the second linker polypeptide is conjugated to a cysteine residue at position 275 of the second heavy chain of the antibody.

[3873] F225. A molecule comprising:
[3874] a first polypeptide and a second polypeptide that agonize a glucagon receptor (“GCGR”), wherein the first polypeptide and the second polypeptide each comprise the amino acid sequence of SEQ ID NO: 1826;
[3875] a first linker polypeptide and a second linker polypeptide, wherein the first linker polypeptide and the second linker polypeptide each comprise the amino acid sequence of SEQ ID NO: 1628; and
[3876] an antibody that specifically binds to a glucose-dependent insulinotropic polypeptide receptor (“GIPR”), wherein the antibody comprises a first light chain and a second light chain, wherein the first light chain and the second light chain each comprise the amino acid sequence of SEQ ID NO: 388, and a first heavy chain and a second heavy chain, wherein the first heavy chain and the second heavy chain each comprise the amino acid sequence of SEQ ID NO: 1571,
[3877] wherein:
   [3878] an ε-amino group of a lysine residue at position 28 of the first polypeptide is covalently linked to a C-terminus of the first linker polypeptide;
   [3879] an N-terminus of the first linker polypeptide is conjugated to a cysteine residue at position 275 of the first heavy chain of the antibody;
   [3880] an ε-amino group of a lysine residue at position 28 of the second polypeptide is covalently linked to a C-terminus of the second linker polypeptide; and
   [3881] an N-terminus of the second linker polypeptide is conjugated to a cysteine residue at position 275 of the second heavy chain of the antibody.

[3882] F226. A molecule comprising:
[3883] a first polypeptide and a second polypeptide that agonize a glucagon receptor (“GCGR”), wherein the first polypeptide and the second polypeptide each comprise the amino acid sequence of SEQ ID NO: 1818;
[3884] a first linker polypeptide and a second linker polypeptide, wherein the first linker polypeptide and the second linker polypeptide each comprise the amino acid sequence of SEQ ID NO: 1628; and
[3885] an antibody that specifically binds to a glucose-dependent insulinotropic polypeptide receptor (“GIPR”), wherein the antibody comprises a first light chain and a second light chain, wherein the first light chain and the second light chain each comprise the amino acid sequence of SEQ ID NO: 388, and a first heavy chain and a second heavy chain, wherein the first heavy chain and the second heavy chain each comprise the amino acid sequence of SEQ ID NO: 1571,
[3886] wherein:
   [3887] an ε-amino group of a lysine residue at position 28 of the first polypeptide is covalently linked to a C-terminus of the first linker polypeptide;
   [3888] an N-terminus of the first linker polypeptide is conjugated to a cysteine residue at position 275 of the first heavy chain of the antibody;
   [3889] an ε-amino group of a lysine residue at position 28 of the second polypeptide is covalently linked to a C-terminus of the second linker polypeptide; and
   [3890] an N-terminus of the second linker polypeptide is conjugated to a cysteine residue at position 275 of the second heavy chain of the antibody.

[3891] F227. A pharmaceutical composition comprising:
[3892] a polypeptide of any one of F1-F55 or a molecule of any one of F56-F226; and a pharmaceutically acceptable excipient.

[3893] F228. A method of treating obesity in a subject in need thereof, the method comprising administering a polypeptide of any one of F1-F55, a molecule of any one of F56-F226, or a pharmaceutical composition of F227 to the subject.

[3894] F229. A polypeptide of any one of F1-F55, a molecule of any one of F56-F226, or a pharmaceutical composition of F227 for use in treating obesity.

[3895] F230. Use of a polypeptide of any one of F1-F55 or a molecule of any one of F56-F226 in the manufacture of a medicament for treating obesity.

[3896] F231. The method of F228, the polypeptide, molecule or pharmaceutical composition for use of F229, and the use of F230, wherein treating obesity comprises lowering blood glucose, insulin, triglyceride, or cholesterol levels; reducing body weight; and/or improving glucose tolerance, energy expenditure, or insulin sensitivity.

[3897] F232. A method of reducing body weight and/or food intake in a subject in need thereof, the method comprising administering a polypeptide of any one of F1-F55, a molecule of any one of F56-F226, or a pharmaceutical composition of F227 to the subject.

[3898] F233. A polypeptide of any one of F1-F55, a molecule of any one of F56-F226, or a pharmaceutical composition of F227 for use in reducing body weight and/or food intake in a subject in need thereof.

[3899] F234. Use of a polypeptide of any one of F1-F55 or a molecule of any one of F56-F226 in the manufacture of a medicament for reducing body weight and/or food intake in a subject in need thereof.

[3900] F235. The method of F232, the polypeptide, molecule or pharmaceutical composition for use of F233, and the use of F234, wherein the subject is overweight or obese.

[3901] F236. A method of treating obesity in a subject in need thereof, the method comprising administering a polypeptide of any one of F1-F55, a molecule of any one of F56-F226, or a pharmaceutical composition of F227 to the subject in combination with a GLP-1 agonist.

[3902] F237. A polypeptide of any one of F1-F55, a molecule of any one of F56-F226, or a pharmaceutical composition of F227 for use in a method of treating obesity in a subject in need thereof, wherein the method comprises administering the polypeptide, molecule, or pharmaceutical composition to the subject in combination with a GLP-1 agonist.

[3903] F238. The method of F236 or the polypeptide, molecule or pharmaceutical composition for use of F237, wherein treating obesity comprises lowering blood glucose, insulin, triglyceride, or cholesterol levels; reducing body weight; and/or improving glucose tolerance, energy expenditure, or insulin sensitivity.

[3904] F239. The method of F236 or the polypeptide, molecule or pharmaceutical composition for use of F237, wherein, prior to the administering, the subject experienced a weight-loss plateau.

[3905] F240. The method of F236 or the polypeptide, molecule or pharmaceutical composition for use of F237, wherein the GLP-1 agonist is semaglutide.

[3906] F241. A method of reducing body weight and/or food intake in a subject in need thereof, the method comprising administering a polypeptide of any one of F1-F55, a molecule of any one of F56-F226, or a pharmaceutical composition of F227 to the subject in combination with a GLP-1 agonist.

[3907] F242. A polypeptide of any one of F1-F55, a molecule of any one of F56-F226, or a pharmaceutical composition of F227 for use in a method of reducing body weight and/or food intake in a subject in need thereof, wherein the method comprises administering the polypeptide, molecule, or pharmaceutical composition to the subject in combination with a GLP-1 agonist.

[3908] F243. The method of F241 or the polypeptide, molecule, or pharmaceutical composition for use of F242, wherein the subject is overweight or obese.

[3909] F244. The method of F241 or the polypeptide, molecule, or pharmaceutical composition for use of F242, wherein the GLP-1 agonist is semaglutide.

[3910] F245. The method of F241 or the polypeptide, molecule, or pharmaceutical composition for use of F242, wherein the subject is overweight or obese and the GLP-1 agonist is semaglutide.

[3911] F246. The method of any one of F241 or F243-F245 or the polypeptide, molecule, or pharmaceutical composition for use of any one of F242-F245, wherein the GLP-1 agonist and the polypeptide, molecule, or pharmaceutical composition for use are administered in consecutive, non-overlapping dosing intervals, wherein the GLP-1 agonist is administered prior to the polypeptide, molecule, or pharmaceutical composition.

[3912] F247. The method of any one of F241 or F243-F245 or the polypeptide, molecule, or pharmaceutical composition for use of any one of F242-F245, wherein the GLP-1 agonist and the polypeptide, molecule, or pharmaceutical composition for use are administered concurrently.

[3913] F248. The method or the polypeptide, molecule, or pharmaceutical composition for use of F247, wherein at least one dose of the GLP-1 agonist is administered prior to a first administration of the polypeptide, molecule, or pharmaceutical composition.

[3914] The following examples are given for the purpose of illustrating various embodiments of the disclosure and are not meant to limit the present disclosure in any fashion. One skilled in the art will appreciate readily that the present disclosure is well-adapted to carry out the objects and obtain the ends and advantages mentioned, as well as those objects, ends, and advantages inherent herein. Changes therein and other uses which are encompassed within the spirit of the disclosure as defined by the scope of the claims will occur to those skilled in the art.

### EXAMPLES

[3915] This section provides specific examples of polypeptide agonists of human glucagon receptor, conjugates comprising the same, and methods of making and using the same.

### List of Abbreviations

[3916] ° degree(s)
[3917] % percentage
[3918] Å angstrom(s)
[3919] ACN or MeCN or CH₃CN acetonitrile
[3920] aDNP anti-dinitrophenyl
[3921] aGIPR anti-glucose-dependent insulinotropic polypeptide receptor
[3922] ANOVA analysis of variance
[3923] BOC or Boc tert-butyloxycarbonyl
[3924] BSA bovine serum albumin
[3925] cAMP cyclic adenosine monophosphate
[3926] CHO Chinese hamster ovary
[3927] CLND chemiluminescent nitrogen detection
[3928] CV column volume(s)
[3929] Da dalton(s)
[3930] DCM dichloromethane
[3931] DHAA dehydroascorbic acid
[3932] DIC N,N-diisopropylcarbodiimide
[3933] DIO diet-induced obese
[3934] DMF N,N-dimethylformamide
[3935] DMSO dimethyl sulfoxide
[3936] DNP dinitrophenyl
[3937] DNP×GCG Conjugate comprising an anti-dinitrophenyl antibody and a glucagon receptor agonist
[3938] ECD extracellular domain
[3939] EDTA ethylenediaminetetraacetic acid
[3940] ELISA enzyme-linked immunosorbent assay
[3941] EPI epididymal
[3942] eq or eq. or equiv. equivalent
[3943] Fmoc fluorenylmethoxycarbonyl
[3944] g or gr gram(s)
[3945] GCG glucagon
[3946] GCGR glucagon receptor
[3947] GLP-1 glucagon-like peptide-1
[3948] GLP-1R glucagon-like peptide-1 receptor
[3949] GIP glucose-dependent insulinotropic polypeptide
[3950] GIPR glucose-dependent insulinotropic polypeptide receptor
[3951] GIPR×GCG Conjugate comprising an anti-glucose-dependent insulinotropic polypeptide receptor antibody and a glucagon receptor agonist
[3952] h or hr hour(s)
[3953] H₂O water
[3954] HCl hydrogen chloride
[3955] HEPES 4-(2-hydroxyethyl)-1-piperazineethanesulfonic acid
[3956] HPLC high pressure liquid chromatography
[3957] HTRF homogeneous time-resolved fluorescence
[3958] hu human
[3959] IBMX 3-isobutyl-1-methylxanthine
[3960] ING inguinal
[3961] i.p. intraperitoneal
[3962] IR infrared
[3963] ivDde (4,4-dimethyl-2,6-dioxocyclohex-1-ylidene)-3-methylbutyl
[3964] kDa kilodalton(s)
[3965] kg kilogram(s)
[3966] L liter(s)
[3967] LC MS, LCMS, LC-MS or LC/MS liquid chromatography mass spectroscopy
[3968] M molar
[3969] MBHA methylbenzhydryl
[3970] mg milligram(s)
[3971] min minute(s)
[3972] mL milliliter(s)
[3973] mM millimolar(s)
[3974] mpk milligram(s) (mg) per kilogram (kg)
[3975] Na₂CO₃ sodium carbonate
[3976] NaOAc sodium acetate
[3977] (NH₄)₂SO₄ ammonium sulfate
[3978] No. number
[3979] OGTT oral glucose tolerance test
[3980] Oxyma ethyl cyanohydroxyiminoacetate
[3981] P20 or PS20 polysorbate 20
[3982] PBS phosphate buffered saline
[3983] PES polyethersulfone
[3984] RP reverse phase
[3985] RT room temperature
[3986] SE or SEM standard error of the mean
[3987] SEC size exclusion chromatography
[3988] TFA trifluoroacetic acid
[3989] TGA triacylglycerol
[3990] TIS triisopropyl silane
[3991] TOF time-of-flight
[3992] TPPTS triphenylphosphine-3,3′,3″-trisulfonic acid trisodium salt
[3993] μg microgram
[3994] μM micromolar
[3995] WAT white adipose tissue

### Section 1: Synthesis of Antibody-Peptide Conjugates

[3996] Provided in this section is a description of a general procedure used to prepare the specific example antibody-peptide conjugates and Fc-peptide conjugates provided herein in Table 19. In Table 19, a conjugate number may be formatted as a five-digit number followed by a dash and a one-digit number. The five-digit number corresponds to the sequence of the conjugate, and, where present, the one-digit number refers to a lot number. Additionally, conjugate descriptions in Table 19 are written such that the antibody or Fc name precedes the dash and the numerical peptide-linker molecule identifier follows the dash. Additionally, in Table 19, the peptide attachment point describes the amino acid of the GCGR agonist peptide that connects to the linker polypeptide. The HC attachment point describes the amino acid of the anti-GIPR antibody that is connected to the linker polypeptide.

[3997] The GCGR agonist peptides in conjugates 40749, 40752, 40754, 43479, 43480, 91660, and 91661 are amidated at their C-termini.

### Part 1: Peptide-Linker Molecule Synthesis

[3998] Peptides with linkers were prepared by fluorenylmethoxycarbonyl (Fmoc)-based solid peptide synthesis using either 4-(2′,4′-dimethoxyphenyl-Fmoc-aminmethyl)-phenoxyacetamido-methylbenzhydryl amine resin (Rink Amide-MBHA Resin, ChemPep Inc.) to generate C-terminal amides or pre-substituted p-benzyloxybenzyl alcohol resin (pre-substituted Wang resin, Polymer Laboratories) to generate C-terminal acids. The syntheses were typically performed on either a MultiPep RSi (Intavis Inc.) at ambient temperature or a Gyros-Protein Technologies Tribute IR-Heated Synthesizer (50-75° C.) or a CEM Liberty Blue microwave-heated synthesizer (50-90° C.). The synthesizers utilized 20% v/v 4-methyl piperidine in N,N-dimethylformamide (DMF) for Fmoc removal and 1,3-diisopropylcarbodiimide (DIC)/ethyl cyano(hydroxyimino)acetate (oxyma) for amino acid coupling. Each residue was coupled with an excess of coupling solution (5.0 eq), and each coupling reaction was performed twice at each position. Differential protection of selected lysine residues was performed with (4,4-dimethyl-2,6-dioxocyclohex-1-ylidene)-3-methylbutyl (ivDde), and the ivDde group was selectively removed with 5% v/v hydrazine in DMF. The completed N-terminal residue on the main chain was protected with a t-butoxycarbonyl (Boc) protecting group.

[3999] Separately, a solution of bromoacetic acid (0.5 M in DCM, 20 eq) was carefully treated with DIC (1.0 M in DMF, 10 eq) and allowed to form the anhydride for 10 min. The entire solution was then added to the deprotected resin from above to install the bromoacetyl amide.

[4000] The completed peptide sequence was treated with a solution of trifluoroacetic acid/triisopropyl silane/water (TFA/TIS/H₂O=94:3:3) and stirred for 2 hours. The mixture was filtered, and the solution was partially dried by vacuum distillation. The peptide was precipitated with cyclopentylmethyl ether and centrifuged to pellet, and the solid was washed with methyl-t-butyl ether. After drying under vacuum overnight, the solid was dissolved in DMSO and purified by reverse-phase HPLC (Phenomenex Gemini®, 5 μm, 110 Å, 250×30 mm, A: 0.1% v/v TFA in water, B: 0.1% v/v TFA in ACN, gradient: 25%-40% v/v B over 60 min). The clean fractions of desired product were pooled, frozen, and lyophilized. The dried peptide was characterized for purity by LC/MS (Agilent 1290 HPLC equipped with a 6130 single-quad MS) and for peptide content by CLND (PAC).

Part 2: Antibody Conjugation with Peptide-Linker Molecule

[4001] Engineered antibodies with specific cysteine mutations were incubated with a solution of 1.0 mM cysteamine and 2.5 mM cystamine in 40 mM HEPES buffer (pH 8.2) at 2.5 mg/mL concentration for 15-20 hours. The reaction mixture was filtered through a 0.22 m polyethersulfone (PES) filter and diluted with 100 mM sodium acetate buffer pH 5.0. The reaction mixture was purified by cation exchange chromatography (Cytiva HiPrep™ 25 mL SP/HP, A: 20 mM NaOAc, pH 5.0, B: A+1.0 M NaCl, gradient: 0-30% v/v B over 10 CV, 5 mL/min). The main peak containing cysteamine-capped protein was collected and buffer exchanged to 10 mM sodium acetate with 9% w/v sucrose, pH 5.2 using MilliporeAmicon® Ultra-15 centrifugal concentrators (30 kDa membrane).

[4002] The above protein solution (6 mg/mL in 10 mM sodium acetate with 9% sucrose) was partially reduced using four equivalents of triphenylphosphine-3,3′,3′″-trisulfonic acid trisodium salt (TPPTS) at room temperature (RT) for 60-90 minutes. Reaction completion was determined by analytical cation exchange chromatography (YMC BioPro SP-F, 30×4.6 mm, A: 20 mM NaOAc, pH 5.0, B: A+1.0 M NaCl, 1.5 mL/min, Gradient: 10-30% B over 4 min). Excess TPPTS and reduction byproducts were removed by buffer exchange into clean 10 mM NaOAc, 9% sucrose, pH 5.2 using a centrifugal filter with a molecular weight cutoff at 30 kDa (MilliporeAmicon® Ultra-15). The reduced protein was diluted with 50 mM sodium phosphate buffer containing 2 mM ethylenediaminetetraacetic acid (EDTA) at pH 7.5 and treated with ten equivalents of dehydroascorbic acid (DHAA, BioSynth International) at RT until only trace amounts of partially reduced protein species were observed (30-120 minutes, monitored by RP-HPLC, Agilent PLRP-S, 4000 Å pore size, 5 μm particle size, 50×4.6 mm, A: 0.1% v/v TFA in H₂O, B: 0.1% v/v TFA in CH₃CN, gradient: 2-50% v/v B over 8 min). Without removing DHAA, 3-8 equivalents of bromoacetyl-glucagon-active peptide were added to the reaction mixture and incubated at RT for 15-20 hours. The completed reaction was typically purified by hydrophobic interaction chromatography (Cytiva HiTrap™ Butyl-HP, 5 mL; A: 1.0 M (NH₄)₂SO₄, 20 mM NaOAc, pH 5.0, B: 20 mM NaOAc, 10% v/v acetonitrile, pH 5.0, gradient: 0-100% v/v B over 50 min, 5.0 mL/min). The fractions containing desired product were pooled and buffer exchanged into 10 mM NaOAc, 9% w/v sucrose, pH 5.2. The material was characterized by HPLC-TOF-MS (Agilent 1260 HPLC equipped with a G6230B TOF-MS) and size exclusion chromatography (Agilent 1260 Bio-inert HPLC equipped with a Tosoh QC-Pak GFC 300 column).

[4003] Fc conjugates may be prepared by a similar process.

TABLE 19
GCGR Agonist Conjugate Constructs

| | | GCGR | | | | | | |
|---|---|---|---|---|---|---|---|---|
| | | Agonist | Peptide | Linker | HC | hGCGR | | |
| Conjugate | | SEQ ID | Attachment | SEQ ID | Attachment | EC₅₀ | hGIPR | hGLP-1R |
| No. | Description | NO: | Point | NO: | Point | (pM) | IC₅₀ (nM) | EC₅₀ (pM) |
| 16746-6 | aDNP SEFL2 | 1596 | K28 | 1629 | C273 | 79.5 | 0 | 27900 |
| | E384C-15997 | | | | | | | |
| 31214-1 | aDNP 3B1 SEFL2 | 1597 | K24 | 1629 | C278 | 52.1 | not tested | 136800 |
| | E384C-29137 | | | | | | | |
| 31215-1 | aDNP 3B1 SEFL2 | 1598 | K24 | 1629 | C278 | 62.1 | not tested | ~62020 |
| | E384C-29138 | | | | | | | |
| 31216-1 | aDNP 3B1 SEFL2 | 1599 | K28 | 1629 | C278 | 69.5 | not tested | 42350 |
| | E384C-29139 | | | | | | | |
| 31217-1 | aDNP 3B1 SEFL2 | 1600 | K28 | 1629 | C278 | 105.3 | not tested | 75290 |
| | E384C-29141 | | | | | | | |
| 31219-1 | aDNP 3B1 SEFL2 | 1601 | K28 | 1629 | C278 | 152.6 | not tested | 49620 |
| | E384C-29636 | | | | | | | |
| 31220-1 | aDNP 3B1 SEFL2 | 1602 | K28 | 1629 | C278 | 57.9 | not tested | 35010 |
| | E384C-29637 | | | | | | | |
| 31224-1 | aDNP 3B1 SEFL2 | 1603 | K28 | 1629 | C278 | 118.7 | not tested | 47460 |
| | E384C-29144 | | | | | | | |
| 34457-1 | aDNP 3B1 SEFL2 | 1604 | K28 | 1629 | C278 | 171.6 | not tested | 23300 |
| | E384C-31470 | | | | | | | |
| 34458-1 | aDNP 3B1 SEFL2 | 1605 | K28 | 1629 | C278 | 60.9 | not tested | 118500 |
| | E384C-31471 | | | | | | | |
| 34462-1 | aDNP 3B1 SEFL2 | 1588 | K28 | 1629 | C278 | 122.6 | not tested | 15500 |
| | E384C-31474 | | | | | | | |
| 34463-1 | aDNP 3B1 SEFL2 | 1606 | K28 | 1629 | C278 | 131.5 | not tested | 40930 |
| | E384C-32348 | | | | | | | |
| 34467-1 | aDNP 3B1 SEFL2 | 1607 | K28 | 1629 | C278 | 130.0 | not tested | 59630 |
| | E384C-32241 | | | | | | | |
| 34470-1 | aDNP 3B1 SEFL2 | 1608 | K28 | 1629 | C278 | 183.9 | not tested | 37750 |
| | E384C-32243 | | | | | | | |
| 34471-1 | aDNP 3B1 SEFL2 | 1609 | K28 | 1629 | C278 | 232.4 | not tested | 12750 |
| | E384C-32244 | | | | | | | |
| 35187-1 | aDNP 3B1 SEFL2 | 1879 | K28 | 1631 | C278 | 186.7 | not tested | 91510 |
| | E384C-31442 | | | | | | | |
| 35190-1 | aDNP 3B1 SEFL2 | 1611 | K28 | 1629 | C278 | 79.7 | not tested | 8934 |
| | E384C-32308 | | | | | | | |
| 36839-1 | aGIPR 5G12 SEFL2 | 1747 | K28 | 1629 | C276 | 123.1 | not tested | 43630 |
| | E384C-35881 | | | | | | | |
| 37468-1 | aGIPR 5G12 SEFL2 | 1603 | K28 | 1629 | C276 | 47.9 | not tested | 17340 |
| | E384C-29144 | | | | | | | |
| 39010-1 | aGIPR 5G12 SEFL2 | 1612 | K28 | 1629 | C276 | 24.7 | not tested | |
| | E384C-37059 | | | | | | | |
| 39011-1 | aGIPR 5G12 SEFL2 | 1613 | K24 | 1629 | C276 | 47.7 | not tested | 32040 |
| | E384C-36852 | | | | | | | |
| 39314-1 | aGIPR 5G12 SEFL2 | 1880 | K28 | 1629 | C276 | 58.1 | not tested | 50110 |
| | E384C-38864 | | | | | | | |
| 39316-1 | aGIPR 5G12 SEFL2 | 1615 | K28 | 1629 | C276 | 71.2 | 144.6 | 99060 |
| | E384C-38866 | | | | | | | |
| 39543-1 | aGIPR 5G12 SEFL2 | 1616 | K28 | 1629 | C276 | 27.8 | 103.1 | 40940 |
| | E384C-38867 | | | | | | | |
| 39546-1 | aGIPR 5G12 SEFL2 | 1617 | K28 | 1629 | C276 | 61.2 | not tested | 38970 |
| | E384C-38870 | | | | | | | |
| 39565-1 | aGIPR 5G12 SEFL2 | 1618 | K28 | 1629 | C276 | 71.3 | not tested | 19180 |
| | E384C-38871 | | | | | | | |
| 39584-1 | aGIPR 5G12 SEFL2 | 1619 | K28 | 1629 | C276 | 40.0 | 139.6 | 23860 |
| | E384C-38878 | | | | | | | |
| 39585-1 | aGIPR 5G12 SEFL2 | 1620 | K28 | 1629 | C276 | 52.4 | 113.7 | 44410 |
| | E384C-38879 | | | | | | | |
| 39988-1 | aGIPR 5G12 SEFL2 | 1588 | K28 | 1629 | C276 | 115.8 | 117.8 | 12590 |
| | E384C-31474 | | | | | | | |
| 40757-1 | aGIPR 5G12 SEFL2 | 1621 | K28 | 1629 | C276 | 22.8 | 171.0 | 21410 |
| | E384C-39983 | | | | | | | |
| 40759-1 | aGIPR 5G12 SEFL2 | 1622 | K28 | 1629 | C276 | 20.2 | 164.0 | 11590 |
| | E384C-39985 | | | | | | | |
| 40760-1 | aGIPR 5G12 SEFL2 | 1623 | K28 | 1629 | C276 | 26.6 | 195.4 | 4995 |
| | E384C-39890 | | | | | | | |
| 41871-1 | aGIPR 5G12 SEFL2 | 1624 | K28 | 1629 | C276 | 108.6 | not tested | 46540 |
| | E384C-41471 | | | | | | | |
| 41961-1 | aGIPR 5G12 SEFL2 | 1589 | K24 | 1629 | C276 | 68.7 | not tested | 5170 |
| | E384C-41683 | | | | | | | |
| 41962-1 | aGIPR 5G12 SEFL2 | 1592 | K24 | 1629 | C276 | 49 .. | not tested | 5471 |
| | E384C-41682 | | | | | | | |
| 41963-1 | aGIPR 5G12 SEFL2 | 1594 | K24 | 1629 | C276 | 135.1 | not tested | 86160 |
| | E384C-41681 | | | | | | | |
| 41964-1 | aGIPR 5G12 SEFL2 | 1590 | K28 | 1629 | C276 | 89.1 | not tested | 3650 |
| | E384C-41680 | | | | | | | |
| 41965-1 | aGIPR 5G12 SEFL2 | 1595 | K28 | 1629 | C276 | 106.2 | not tested | 27550 |
| | E384C-41679 | | | | | | | |
| 41966-1 | aGIPR 5G12 SEFL2 | 1881 | K24 | 1629 | C276 | 35.6 | not tested | 3411 |
| | E384C-41678 | | | | | | | |
| 41968-1 | aGIPR 5G12 SEFL2 | 1599 | K28 | 1629 | C276 | 52.3 | not tested | 5994 |
| | E384C-29139 | | | | | | | |
| 41972-1 | aGIPR 5G12 SEFL2 | 1596 | K28 | 1640 | C276 | 37.7 | not tested | 1754 |
| | E384C-41216 | | | | | | | |
| 41974-1 | aGIPR 5G12 SEFL2 | 1596 | K28 | 1628 | C276 | 172.6 | not tested | 13700 |
| | E384C-41218 | | | | | | | |
| 41975-1 | aGIPR 5G12 SEFL2 | 1596 | K28 | 1630 | C276 | 109.3 | not tested | 11020 |
| | E384C-41219 | | | | | | | |
| 41978-1 | aGIPR 5G12 SEFL2 | 1597 | K24 | 1640 | C276 | 62.5 | not tested | 9727 |
| | E384C-41477 | | | | | | | |
| 41979-1 | aGIPR 5G12 SEFL2 | 1597 | K24 | 1632 | C276 | 60.1 | not tested | 8566 |
| | E384C-41476 | | | | | | | |
| 41980-1 | aGIPR 5G12 SEFL2 | 1597 | K24 | 1628 | C276 | 50.3 | not tested | 3115 |
| | E384C-41475 | | | | | | | |
| 41981-1 | aGIPR 5G12 SEFL2 | 1597 | K24 | 1630 | C276 | 155.0 | not tested | 15710 |
| | E384C-41474 | | | | | | | |
| 41986-1 | aGIPR 5G12 SEFL2 | 1591 | K28 | 1629 | C276 | 86.2 | 162.1 | 47520 |
| | E384C-41684 | | | | | | | |
| 43161-1 | aGIPR 5G12 SEFL2 | 1596 | K28 | 1644 | C276 | 77.6 | not tested | 20880 |
| | E384C-42021 | | | | | | | |
| 43888-2 | aGIPR 5G12 SEFL2 | 1615 | K28 | 1630 | C276 | 79.7 | not tested | 90660 |
| | E384C-43779 | | | | | | | |
| 44499-1 | aGIPR 5G12 SEFL2 | 1626 | K28 | 1629 | C276 | 56.2 | 76.5 | 25220 |
| | E384C-44405 | | | | | | | |
| 44958-1 | aGIPR 5G12 SEFL2 | 1627 | K28 | 1628 | C276 | 26.8 | not tested | 40740 |
| | E384C-44868 | | | | | | | |
| 44959-1 | aGIPR 5G12 SEFL2 | 1626 | K28 | 1628 | C276 | 87.2 | 162.3 | 47330 |
| | E384C-44869 | | | | | | | |
| 44960-1 | aGIPR 5G12 SEFL2 | 1593 | K28 | 1628 | C276 | 37.7 | not tested | 41870 |
| | E384C-44870 | | | | | | | |
| 44961-1 | aGIPR 5G12 SEFL2 | 1592 | K24 | 1628 | C276 | 22.3 | 104.7 | 93700 |
| | E384C-44871 | | | | | | | |
| 44962-1 | aGIPR 5G12 SEFL2 | 1621 | K28 | 1628 | C276 | 37.0 | not tested | 5206000 |
| | E384C-44872 | | | | | | | |
| 44963-1 | aGIPR 5G12 SEFL2 | 1621 | K28 | 1630 | C276 | 60.4 | not tested | 680800 |
| | E384C-44873 | | | | | | | |
| 44964-1 | aGIPR 5G12 SEFL2 | 1615 | K28 | 1628 | C276 | 27.8 | not tested | 99610 |
| | E384C-44874 | | | | | | | |
| 44965-1 | aGIPR 5G12 SEFL2 | 1622 | K28 | 1630 | C276 | 51.5 | not tested | 128900 |
| | E384C-45025 | | | | | | | |
| 44966-1 | aGIPR 5G12 SEFL2 | 1622 | K28 | 1628 | C276 | 24.7 | not tested | 42360 |
| | E384C-44875 | | | | | | | |
| 45030-4 | aGIPR 2G10 SEFL2 | 1592 | K24 | 1628 | C275 | 44.9 | 88.9 | 88380 |
| | E384C-44871 | | | | | | | |
| 45053-1 | aGIPR 5G12 SEFL2 | 1627 | K28 | 1630 | C276 | 52.6 | not tested | 72290 |
| | E384C-45023 | | | | | | | |
| 45055-1 | aGIPR 5G12 SEFL2 | 1626 | K28 | 1630 | C276 | 63.4 | not tested | 79260 |
| | E384C-45024 | | | | | | | |
| 45056-1 | aGIPR 5G12 SEFL2 | 1593 | K28 | 1630 | C276 | 47.3 | not tested | 25170 |
| | E384C-44876 | | | | | | | |
| 45333-1 | aGIPR 2G10 SEFL2 | 1615 | K28 | 1629 | C275 | 68.0 | 51.9 | 58850 |
| | E384C-38866 | | | | | | | |
| 46172-4 | aGIPR 2G10 SEFL2 | 1626 | K28 | 1628 | C275 | 63.4 | 37.4 | 57540 |
| | E384C-44869 | | | | | | | |
| 50705-1 | aGIPR 2G10 SEFL2 | 1626 | K28 | 1629 | C275 | 37.9 | 29.1 | 39390 |
| | E384C-44405 | | | | | | | |
| 51671-1 | aGIPR 2G10 SEFL2 | 1587 | K28 | 1628 | C275 | 56.1 | 7.8 | 23690 |
| | E384C-50927 | | | | | | | |
| 51672-1 | aGIPR 2G10 SEFL2 | 1587 | K28 | 1630 | C275 | 236.4 | 92.1 | 17230 |
| | E384C-51493 | | | | | | | |
| 52398-1 | aGIPR 5G12 SEFL2 | 1587 | K28 | 1628 | C276 | 109.6 | 71.3 | 38850 |
| | E384C-50927 | | | | | | | |
| 52399-1 | aGIPR 5G12 SEFL2 | 1587 | K28 | 1630 | C276 | 452.4 | 162.2 | 50010 |
| | E384C-51493 | | | | | | | |
| 1658 | aGIPR 2G10.007 | 1859 | K28 | 1639 | C275 | not tested | not tested | not tested |
| | SEFL2-E384C- | | | | | | | |
| | 3358060 | | | | | | | |
| 1659 | aGIPR 2G10.007 | 1860 | K21 | 1639 | C275 | not tested | not tested | not tested |
| | SEFL2-E384C- | | | | | | | |
| | 3358061 | | | | | | | |
| 1898 | aGIPR 2G10.007 | 1859 | K28 | 1629 | C275 | 704.8 | not tested | 9616.0 |
| | SEFL2-E384C- | | | | | | | |
| | 3360331 | | | | | | | |
| 16745 | aDNP SEFL2 E384C- | 1748 | K28 | 1629 | C273 | not tested | not tested | not tested |
| | 15996 | | | | | | | |
| 24998 | aDNP SEFL2 E384C- | 1750 | Azk28 | 1739 | C273 | 28.0 | not tested | not tested |
| | 15997-triazole | | | | | | | |
| 25267 | 655-341 SEFL2 | 1596 | K28 | 1629 | C364 | 16.8 | not tested | 4065.0 |
| | T487C-15997 | | | | | | | |
| 25289 | 655-341 SEFL2 | 1596 | K28 | 1629 | C277 | 28.3 | 0.0 | 25770.0 |
| | E384C-15997 | | | | | | | |
| 25435 | Fc SEFL2 T487C- | 1596 | K28 | 1629 | C139 | 9.1 | not tested | 9770.0 |
| | 15997 | | | | | | | |
| 25444 | aDNP 3B1 SEFL2 | 1596 | K28 | 1629 | C278 | 53.1 | 0.0 | 25500.0 |
| | E384C-15997 | | | | | | | |
| 25445 | aGIPR 2G10.007 | 1596 | K28 | 1629 | C275 | 51.5 | curve not | 34680.0 |
| | SEFL2-E384C- | | | | | | converged | |
| | 15997 | | | | | | | |
| 25458 | aGIPR 5G12 SEFL2 | 1596 | K28 | 1629 | C276 | 32.4 | 223.7 | 20290.0 |
| | E384C-15997 | | | | | | | |
| 25653 | aDNP SEFL2 E384C- | 1749 | K28 | 1629 | C273 | 16.9 | not tested | 1539.0 |
| | 23775 | | | | | | | |
| 25675 | aGIPR 5G12 SEFL2 | 1596 | K28 | 1629 | C363 | 16.5 | not tested | 10960.0 |
| | T487C-15997 | | | | | | | |
| 25676 | 655-341 SEFL2 D88C- | 1596 | K28 | 1629 | C71 | 12.8 | not tested | 7034.0 |
| | 15997 | | | | | | | |
| 26917 | aDNP SEFL2 E384C- | 1751 | K28 | 1629 | C273 | 149.9 | not tested | 7957.0 |
| | 25278 | | | | | | | |
| 31226 | aDNP 3B1 SEFL2 | 1764 | K28 | 1631 | C278 | 354.0 | not tested | 146300.0 |
| | E384C-30796 | | | | | | | |
| 34465 | aDNP 3B1 SEFL2 | 1766 | K28 | 1629 | C278 | 613.1 | not tested | 57800.0 |
| | E384C-32350 | | | | | | | |
| 35188 | aDNP 3B1 SEFL2 | 1764 | K28 | 1629 | C278 | 347.9 | not tested | 79520.0 |
| | E384C-32319 | | | | | | | |
| 35191 | aDNP 3B1 SEFL2 | 1765 | K28 | 1629 | C278 | 176.2 | not tested | 141100.0 |
| | E384C-32307 | | | | | | | |
| 36799 | aGIPR 5G12 SEFL2 | 1767 | K24 | 1629 | C276 | 26.6 | not tested | 0.0 |
| | E384C-35507 | | | | | | | |
| 36801 | aGIPR 5G12 SEFL2 | 1861 | K28 | 1629 | C276 | 124.3 | not tested | 0.0 |
| | E384C-35509 | | | | | | | |
| 36803 | aGIPR 5G12 SEFL2 | 1768 | K24 | 1629 | C276 | 51.4 | not tested | ~70460 |
| | E384C-35510 | | | | | | | |
| 36805 | aGIPR 5G12 SEFL2 | 1769 | K28 | 1629 | C276 | 74.0 | not tested | ~4.5e15 |
| | E384C-35512 | | | | | | | |
| 36834 | aGIPR 5G12 SEFL2 | 1770 | K28 | 1629 | C276 | 36.8 | not tested | 9530.0 |
| | E384C-35515 | | | | | | | |
| 36835 | aGIPR 5G12 SEFL2 | 1771 | K28 | 1629 | C276 | 263.0 | not tested | 17350.0 |
| | E384C-35516 | | | | | | | |
| 36836 | aGIPR 5G12 SEFL2 | 1862 | K28 | 1629 | C276 | 1050.0 | not tested | 188400.0 |
| | E384C-35878 | | | | | | | |
| 36837 | aGIPR 5G12 SEFL2 | 1772 | K28 | 1629 | C276 | 620.2 | not tested | ~76670 |
| | E384C-35879 | | | | | | | |
| 36838 | aGIPR 5G12 SEFL2 | 1773 | K28 | 1629 | C276 | 721.0 | not tested | ~323300000 |
| | E384C-35880 | | | | | | | |
| 37467 | aGIPR 5G12 SEFL2 | 1597 | K24 | 1629 | C276 | 24.5 | not tested | 52500.0 |
| | E384C-29137 | | | | | | | |
| 39009 | aGIPR 5G12 SEFL2 | 1774 | K28 | 1629 | C276 | 57.1 | not tested | 0.0 |
| | E384C-37058 | | | | | | | |
| 39315 | aGIPR 5G12 SEFL2 | 1840 | K28 | 1629 | C276 | 191.2 | not tested | 88780.0 |
| | E384C-38865 | | | | | | | |
| 39544 | aGIPR 5G12 SEFL2 | 1775 | K28 | 1629 | C276 | 87.6 | not tested | 17140.0 |
| | E384C-38868 | | | | | | | |
| 39545 | aGIPR 5G12 SEFL2 | 1776 | K28 | 1629 | C276 | 92.6 | not tested | 28710.0 |
| | E384C-38869 | | | | | | | |
| 39578 | aGIPR 5G12 SEFL2 | 1763 | K28 | 1629 | C276 | 155.0 | not tested | 10260.0 |
| | E384C-38872 | | | | | | | |
| 39579 | aGIPR 5G12 SEFL2 | 1777 | K28 | 1629 | C276 | 80.0 | not tested | 49090.0 |
| | E384C-38873 | | | | | | | |
| 39580 | aGIPR 5G12 SEFL2 | 1778 | K28 | 1629 | C276 | 74.6 | not tested | 38000.0 |
| | E384C-38874 | | | | | | | |
| 39581 | aGIPR 5G12 SEFL2 | 1779 | K28 | 1629 | C276 | 98.0 | not tested | 40390.0 |
| | E384C-38875 | | | | | | | |
| 39582 | aGIPR 5G12 SEFL2 | 1780 | K28 | 1629 | C276 | 174.4 | not tested | 152500.0 |
| | E384C-38876 | | | | | | | |
| 39583 | aGIPR 5G12 SEFL2 | 1781 | K28 | 1629 | C276 | 113.6 | not tested | 52330.0 |
| | E384C-38877 | | | | | | | |
| 39586 | aGIPR 5G12 SEFL2 | 1782 | K28 | 1629 | C276 | 366.6 | not tested | 15970.0 |
| | E384C-38880 | | | | | | | |
| 39587 | aGIPR 5G12 SEFL2 | 1783 | K28 | 1629 | C276 | 108.2 | not tested | 39080.0 |
| | E384C-38881 | | | | | | | |
| 40741 | aGIPR 5G12 SEFL2 | 1784 | K28 | 1629 | C276 | 40.9 | not tested | 8015.0 |
| | E384C-39903 | | | | | | | |
| 40743 | aGIPR 5G12 SEFL2 | 1755 | K28 | 1629 | C276 | 31.5 | not tested | 5028.0 |
| | E384C-39906 | | | | | | | |
| 40744 | aGIPR 5G12 SEFL2 | 1785 | K28 | 1629 | C276 | 122.5 | not tested | 8068.0 |
| | E384C-39907 | | | | | | | |
| 40745 | aGIPR 5G12 SEFL2 | 1786 | K28 | 1629 | C276 | 28.2 | not tested | 4634.0 |
| | E384C-39908 | | | | | | | |
| 40746 | aGIPR 5G12 SEFL2 | 1787 | K24 | 1629 | C276 | 17.3 | not tested | ~3821000 |
| | E384C-39909 | | | | | | | |
| 40747 | aGIPR 5G12 SEFL2 | 1791 | K28 | 1629 | C276 | 21.1 | not tested | 73570.0 |
| | E384C-39981 | | | | | | | |
| 40749 | aGIPR 5G12 SEFL2 | 1788 | K24 | 1629 | C276 | 15.4 | not tested | 7916.0 |
| | E384C-39912 | | | | | | | |
| 40752 | aGIPR 5G12 SEFL2 | 1762 | K24 | 1629 | C276 | 22.3 | not tested | 3260.0 |
| | E384C-39915 | | | | | | | |
| 40754 | aGIPR 5G12 SEFL2 | 1789 | K31 | 1629 | C276 | 81.5 | not tested | 5471.0 |
| | E384C-39917 | | | | | | | |
| 40755 | aGIPR 5G12 SEFL2 | 1792 | K28 | 1629 | C276 | 151.0 | not tested | 15010.0 |
| | E384C-39982 | | | | | | | |
| 40758 | aGIPR 5G12 SEFL2 | 1794 | K28 | 1629 | C276 | 70.5 | not tested | 16630.0 |
| | E384C-39984 | | | | | | | |
| 41383 | aGIPR 5G12 SEFL2 | 1754 | K28 | 1629 | C276 | 129.1 | not tested | 183000.0 |
| | E384C-40387 | | | | | | | |
| 41385 | aGIPR 5G12 SEFL2 | 1795 | K28 | 1629 | C276 | 151.7 | not tested | 42870.0 |
| | E384C-40389 | | | | | | | |
| 41389 | aGIPR 5G12 SEFL2 | 1796 | K28 | 1629 | C276 | 44.7 | not tested | 226100.0 |
| | E384C-40835 | | | | | | | |
| 41390 | aGIPR 5G12 SEFL2 | 1790 | K28 | 1629 | C276 | 59.7 | not tested | 223000.0 |
| | E384C-39920 | | | | | | | |
| 41391 | aGIPR 5G12 SEFL2 | 1797 | K24 | 1629 | C276 | 53.3 | not tested | ~69750 |
| | E384C-40837 | | | | | | | |
| 41967 | aGIPR 5G12 SEFL2 | 1798 | K24 | 1629 | C276 | 86.2 | not tested | 38000.0 |
| | E384C-41677 | | | | | | | |
| 41973 | aGIPR 5G12 SEFL2 | 1596 | K28 | 1632 | C276 | 185.6 | not tested | 10460.0 |
| | E384C-41217 | | | | | | | |
| 41977 | aGIPR 5G12 SEFL2 | 1597 | K24 | 1634 | C276 | 139.7 | not tested | 11020.0 |
| | E384C-41478 | | | | | | | |
| 41982 | aGIPR 5G12 SEFL2 | 1597 | K24 | 1641 | C276 | 167.5 | not tested | 24370.0 |
| | E384C-41687 | | | | | | | |
| 41984 | aGIPR 5G12 SEFL2 | 1597 | K24 | 1642 | C276 | 56.6 | not tested | 21550.0 |
| | E384C-41686 | | | | | | | |
| 41985 | aGIPR 5G12 SEFL2 | 1596 | K28 | 1642 | C276 | 76.3 | not tested | 9559.0 |
| | E384C-41685 | | | | | | | |
| 42137 | aGIPR 5G12 SEFL2 | 1757 | K28 | 1629 | C276 | 58.4 | not tested | 11070.0 |
| | E384C-41902 | | | | | | | |
| 42138 | aGIPR 5G12 SEFL2 | 1756 | K28 | 1629 | C276 | 83.2 | not tested | 26850.0 |
| | E384C-41903 | | | | | | | |
| 42139 | aGIPR 5G12 SEFL2 | 1759 | K28 | 1629 | C276 | 80.5 | not tested | 49840.0 |
| | E384C-41904 | | | | | | | |
| 42140 | aGIPR 5G12 SEFL2 | 1758 | K28 | 1629 | C276 | 76.7 | not tested | 54700.0 |
| | E384C-41905 | | | | | | | |
| 42141 | aGIPR 5G12 SEFL2 | 1760 | K28 | 1629 | C276 | 33.0 | not tested | 26710.0 |
| | E384C-41906 | | | | | | | |
| 42142 | aGIPR 5G12 SEFL2 | 1761 | K28 | 1629 | C276 | 72.1 | not tested | 64190.0 |
| | E384C-41907 | | | | | | | |
| 43142 | aGIPR 5G12 SEFL2 | 1596 | K28 | 1635 | C276 | 335.5 | not tested | 38910.0 |
| | E384C-42020 | | | | | | | |
| 43162 | aGIPR 5G12 SEFL2 | 1596 | K28 | 1647 | C276 | 77.8 | not tested | 30790.0 |
| | E384C-42022 | | | | | | | |
| 43163 | aGIPR 5G12 SEFL2 | 1597 | K24 | 1644 | C276 | 51.7 | not tested | 219600.0 |
| | E384C-42023 | | | | | | | |
| 43164 | aGIPR 5G12 SEFL2 | 1597 | K24 | 1647 | C276 | 50.9 | not tested | 196900.0 |
| | E384C-42024 | | | | | | | |
| 43166 | aGIPR 5G12 SEFL2 | 1799 | C-term | 1742 | C276 | 48.9 | not tested | 2056.0 |
| | E384C-42026 | | | | | | | |
| 43167 | aGIPR 5G12 SEFL2 | 1800 | C-term | 1845 | C276 | 27.7 | not tested | 10800.0 |
| | E384C-42027 | | | | | | | |
| 43168 | aGIPR 5G12 SEFL2 | 1800 | C-term | 1846 | C276 | 59.0 | not tested | 14590.0 |
| | E384C-42028 | | | | | | | |
| 43464 | aGIPR 5G12 SEFL2 | 1753 | K28 | 1629 | C276 | 66.3 | not tested | 4292.0 |
| | E384C-42175 | | | | | | | |
| 43465 | aGIPR 5G12 SEFL2 | 1808 | K28 | 1629 | C276 | 46.0 | not tested | 28720.0 |
| | E384C-42176 | | | | | | | |
| 43466 | aGIPR 5G12 SEFL2 | 1809 | K28 | 1629 | C276 | 60.1 | not tested | 9295.0 |
| | E384C-42177 | | | | | | | |
| 43467 | aGIPR 5G12 SEFL2 | 1810 | K28 | 1629 | C276 | 58.0 | not tested | 5946.0 |
| | E384C-42178 | | | | | | | |
| 43468 | aGIPR 5G12 SEFL2 | 1811 | K24 | 1629 | C276 | 25.4 | not tested | 48570.0 |
| | E384C-42179 | | | | | | | |
| 43469 | aGIPR 5G12 SEFL2 | 1812 | K24 | 1629 | C276 | 55.0 | not tested | 23660.0 |
| | E384C-42180 | | | | | | | |
| 43470 | aGIPR 5G12 SEFL2 | 1813 | K28 | 1629 | C276 | 77.0 | not tested | ~1663000000 |
| | E384C-42181 | | | | | | | |
| 43471 | aGIPR 5G12 SEFL2 | 1814 | K28 | 1629 | C276 | 38.3 | not tested | 152800.0 |
| | E384C-42182 | | | | | | | |
| 43472 | aGIPR 5G12 SEFL2 | 1815 | K28 | 1629 | C276 | 63.8 | not tested | 17790.0 |
| | E384C-42183 | | | | | | | |
| 43473 | aGIPR 5G12 SEFL2 | 1799 | C-term | 1849 | C276 | 84.7 | not tested | 3471.0 |
| | E384C-42193 | | | | | | | |
| 43474 | aGIPR 5G12 SEFL2 | 1799 | C-term | 1848 | C276 | 52.1 | not tested | 3298.0 |
| | E384C-42194 | | | | | | | |
| 43475 | aGIPR 5G12 SEFL2 | 1788 | K24 | 1629 | C276 | 21.5 | not tested | 44220.0 |
| | E384C-42127 | | | | | | | |
| 43476 | aGIPR 5G12 SEFL2 | 1801 | K28 | 1629 | C276 | 21.7 | not tested | 6572.0 |
| | E384C-42128 | | | | | | | |
| 43477 | aGIPR 5G12 SEFL2 | 1802 | K28 | 1629 | C276 | 37.0 | not tested | 10400.0 |
| | E384C-42129 | | | | | | | |
| 43478 | aGIPR 5G12 SEFL2 | 1803 | K28 | 1629 | C276 | 276.9 | not tested | ~63140 |
| | E384C-42130 | | | | | | | |
| 43479 | aGIPR 5G12 SEFL2 | 1804 | K24 | 1629 | C276 | 108.4 | not tested | 1163.0 |
| | E384C-42131 | | | | | | | |
| 43480 | aGIPR 5G12 SEFL2 | 1805 | K24 | 1629 | C276 | 34.3 | not tested | 3423.0 |
| | E384C-42132 | | | | | | | |
| 43481 | aGIPR 5G12 SEFL2 | 1806 | K28 | 1629 | C276 | 35.3 | not tested | 21330.0 |
| | E384C-42133 | | | | | | | |
| 43483 | aGIPR 5G12 SEFL2 | 1807 | K28 | 1629 | C276 | 39.4 | not tested | 16640.0 |
| | E384C-42135 | | | | | | | |
| 43911 | aGIPR 5G12 SEFL2 | 1615 | K28 | 1638 | C276 | 261.4 | not tested | 49230.0 |
| | E384C-43818 | | | | | | | |
| 43912 | aGIPR 5G12 SEFL2 | 1615 | K28 | 1640 | C276 | 92.0 | not tested | 53680.0 |
| | E384C-43817 | | | | | | | |
| 44496 | aGIPR 5G12 SEFL2 | 1816 | K28 | 1629 | C276 | 85.5 | not tested | 22450.0 |
| | E384C-44402 | | | | | | | |
| 44497 | aGIPR 5G12 SEFL2 | 1817 | K28 | 1629 | C276 | 101.2 | not tested | 15820.0 |
| | E384C-44403 | | | | | | | |
| 44498 | aGIPR 5G12 SEFL2 | 1627 | K28 | 1629 | C276 | 50.1 | not tested | 21610.0 |
| | E384C-44404 | | | | | | | |
| 44500 | aGIPR 5G12 SEFL2 | 1818 | K28 | 1629 | C276 | 46.6 | not tested | 12540.0 |
| | E384C-44406 | | | | | | | |
| 44501 | aGIPR 5G12 SEFL2 | 1819 | K28 | 1629 | C276 | 33.2 | not tested | 21790.0 |
| | E384C-44407 | | | | | | | |
| 44502 | aGIPR 5G12 SEFL2 | 1820 | K28 | 1629 | C276 | 70.6 | not tested | 21030.0 |
| | E384C-44408 | | | | | | | |
| 44503 | aGIPR 5G12 SEFL2 | 1593 | K28 | 1629 | C276 | 49.1 | not tested | 190700.0 |
| | E384C-44409 | | | | | | | |
| 44984 | aGIPR 2G10 SEFL2 | 1593 | K28 | 1630 | C275 | 139.2 | 33.8 | 46010.0 |
| | E384C-44876 | | | | | | | |
| 45027 | aGIPR 2G10 SEFL2 | 1621 | K28 | 1628 | C275 | 78.5 | 86.9 | 175600.0 |
| | E384C-44872 | | | | | | | |
| 45028 | aGIPR 2G10 SEFL2 | 1621 | K28 | 1630 | C275 | 166.5 | 58.2 | 40220.0 |
| | E384C-44873 | | | | | | | |
| 45029 | aGIPR 2G10 SEFL2 | 1593 | K28 | 1628 | C275 | 69.8 | 49.3 | 28870.0 |
| | E384C-44870 | | | | | | | |
| 45034 | aGIPR 2G10 SEFL2 | 1615 | K28 | 1628 | C275 | 89.9 | 47.9 | 69310.0 |
| | E384C-44874 | | | | | | | |
| 45057 | aGIPR 5G12 SEFL2 | 1793 | C-term | 1741 | C276 | 50.4 | not tested | 5192.0 |
| | E384C-45022 | | | | | | | |
| 45332 | aGIPR 2G10 SEFL2 | 1621 | K28 | 1629 | C275 | 29.7 | 104.6 | 30100.0 |
| | E384C-39983 | | | | | | | |
| 45591 | aGIPR 2G10 SEFL2 | 1622 | K28 | 1628 | C275 | 97.7 | 32.9 | 118100.0 |
| | E384C-44875 | | | | | | | |
| 45592 | aGIPR 2G10 SEFL2 | 1627 | K28 | 1628 | C275 | 75.1 | 67.3 | 56480.0 |
| | E384C-44868 | | | | | | | |
| 46147 | aGIPR 2G10 SEFL2 | 1622 | K28 | 1630 | C275 | 67.2 | 102.4 | 26830.0 |
| | E384C-45025 | | | | | | | |
| 46148 | aGIPR 2G10 SEFL2 | 1627 | K28 | 1630 | C275 | 123.8 | 60.0 | 43160.0 |
| | E384C-45023 | | | | | | | |
| 46149 | aGIPR 2G10 SEFL2 | 1615 | K28 | 1630 | C275 | 291.0 | 80.9 | 63310.0 |
| | E384C-43779 | | | | | | | |
| 46173 | aGIPR 2G10 SEFL2 | 1626 | K28 | 1630 | C275 | 113.3 | 63.1 | 72600.0 |
| | E384C-45024 | | | | | | | |
| 46174 | aGIPR 2G10 SEFL2 | 1622 | K28 | 1629 | C275 | 62.5 | 80.5 | 40170.0 |
| | E384C-39985 | | | | | | | |
| 46175 | aGIPR 2G10 SEFL2 | 1793 | C-term | 1741 | C275 | 190.8 | 115.1 | 12170.0 |
| | E384C-45022 | | | | | | | |
| 60883 | aDNP SEFL2 | 1587 | K28 | 1628 | C273 | 32.5 | ~181.0 | 11690.0 |
| | E384C-50927 | | | | | | | |
| 60894 | aDNP SEFL2 | 1626 | K28 | 1628 | C273 | 42.2 | ~281.8 | 42230.0 |
| | E384C-44869 | | | | | | | |
| 60895 | aDNP SEFL2 | 1626 | K28 | 1629 | C273 | 21.7 | ~543.3 | 25030.0 |
| | E384C-44405 | | | | | | | |
| 88006 | aGIPR 5G12 SEFL2 | 1821 | K24 | 1628 | C276 | 75.4 | not tested | not tested |
| | E384C-86873 | | | | | | | |
| 88007 | aGIPR 5G12 SEFL2 | 1822 | K24 | 1628 | C276 | 30.9 | not tested | not tested |
| | E384C-86874 | | | | | | | |
| 88008 | aGIPR 5G12 SEFL2 | 1819 | K28 | 1628 | C276 | 56.1 | not tested | not tested |
| | E384C-87586 | | | | | | | |
| 88009 | aGIPR 5G12 SEFL2 | 1823 | K28 | 1628 | C276 | 44.4 | not tested | not tested |
| | E384C-86875 | | | | | | | |
| 88010 | aGIPR 5G12 SEFL2 | 1824 | K28 | 1628 | C276 | 37.7 | not tested | not tested |
| | E384C-86876 | | | | | | | |
| 88011 | aGIPR 5G12 SEFL2 | 1825 | K28 | 1628 | C276 | 64.9 | not tested | not tested |
| | E384C-87020 | | | | | | | |
| 88012 | aGIPR 5G12 SEFL2 | 1826 | K28 | 1628 | C276 | 51.6 | not tested | not tested |
| | E384C-87588 | | | | | | | |
| 88013 | aGIPR 5G12 SEFL2 | 1752 | K28 | 1628 | C276 | 41.3 | not tested | not tested |
| | E384C-87021 | | | | | | | |
| 88014 | aGIPR 5G12 SEFL2 | 1793 | C-term | 1841 | C276 | 86.1 | not tested | not tested |
| | E384C-86881 | | | | | | | |
| 88016 | aGIPR 5G12 SEFL2 | 1818 | K28 | 1628 | C276 | 37.2 | not tested | not tested |
| | E384C-87587 | | | | | | | |
| 89982 | aGIPR 2G10 SEFL2 | 1818 | K28 | 1628 | C275 | not tested | not tested | not tested |
| | E384C-87587 | | | | | | | |
| 89983 | aGIPR 2G10 SEFL2 | 1826 | K28 | 1628 | C275 | not tested | not tested | not tested |
| | E384C-87588 | | | | | | | |
| 89984 | aGIPR 2G10 SEFL2 | 1822 | K24 | 1628 | C275 | not tested | not tested | not tested |
| | E384C-86874 | | | | | | | |
| 89985 | aGIPR 2G10 SEFL2 | 1825 | K28 | 1628 | C275 | not tested | not tested | not tested |
| | E384C-87020 | | | | | | | |
| 90658 | aGIPR 5G12 SEFL2 | 1825 | K28 | 1628 | C363 | 40.2 | not tested | 8250.0 |
| | T487C-87020 | | | | | | | |
| 91657 | aGIPR 5G12 SEFL2 | 1827 | K28 | 1628 | C276 | 153.5 | not tested | 53990.0 |
| | E384C-91253 | | | | | | | |
| 91658 | aGIPR 5G12 SEFL2 | 1828 | K28 | 1628 | C276 | 185.7 | not tested | 1963.0 |
| | E384C-91254 | | | | | | | |
| 91659 | aGIPR 5G12 SEFL2 | 1829 | K28 | 1628 | C276 | 152.3 | not tested | 6754.0 |
| | E384C-91255 | | | | | | | |
| 91660 | aGIPR 5G12 SEFL2 | 1825 | K28 | 1628 | C276 | 283.3 | not tested | 2072.0 |
| | E384C-91256 | | | | | | | |
| 91661 | aGIPR 5G12 SEFL2 | 1830 | K28 | 1628 | C276 | 118.9 | not tested | 6346.0 |
| | E384C-91257 | | | | | | | |
| 91662 | aGIPR 5G12 SEFL2 | 1831 | C-term | 1842 | C276 | 286.7 | not tested | 3398.0 |
| | E384C-91258 | | | | | | | |
| 91663 | aGIPR 5G12 SEFL2 | 1831 | C-term | 1847 | C276 | 80.8 | not tested | 1475.0 |
| | E384C-91259 | | | | | | | |
| 91664 | aGIPR 5G12 SEFL2 | 1832 | C-term | 1842 | C276 | 95.9 | not tested | 12420.0 |
| | E384C-91260 | | | | | | | |
| 91665 | aGIPR 5G12 SEFL2 | 1831 | C-term | 1843 | C276 | 127.5 | not tested | 3585.0 |
| | E384C-91261 | | | | | | | |
| 91666 | aGIPR 5G12 SEFL2 | 1831 | C-term | 1844 | C276 | 152.8 | not tested | 5052.0 |
| | E384C-91262 | | | | | | | |
| 91667 | aGIPR 5G12 SEFL2 | 1833 | K24 | 1628 | C276 | 353.1 | not tested | 63400.0 |
| | E384C-91656 | | | | | | | |
| 92868 | aGIPR 5G12 SEFL2 | 1834 | K28 | 1628 | C276 | 127.2 | not tested | 289.0 |
| | E384C-92840 | | | | | | | |
| 92874 | aGIPR 5G12 SEFL2 | 1835 | K28 | 1628 | C276 | 13350.0 | not tested | 6379.0 |
| | E384C-92841 | | | | | | | |
| 93070 | aGIPR 5G12 SEFL2 | 1836 | K28 | 1628 | C276 | 146.7 | not tested | 1983.0 |
| | E384C-92842 | | | | | | | |
| 93071 | aGIPR 5G12 SEFL2 | 1837 | K24 | 1628 | C276 | 127.3 | not tested | 22970.0 |
| | E384C-92843 | | | | | | | |
| 93072 | aGIPR 5G12 SEFL2 | 1838 | K24 | 1628 | C276 | 110.5 | not tested | 16380.0 |
| | E384C-92847 | | | | | | | |

### Section 2: In Vitro Characterization of GCGR Agonist Conjugate Constructs

### Example 1: GCG Receptor Agonist Activity

[4004] CHOK1 cells stably expressing human GCGR and primary human and mouse hepatocytes with endogenous levels of GCGR were used to measure conjugate-induced cAMP production in a homogeneous time-resolved fluorescence (HTRF) assay (Cisbio, Catalog No. 62AM4PEJ). Serial diluted conjugates were incubated with 40,000 cells in assay buffer (0.1% v/v BSA, 500 pM IBMX in F12 media) for 15 min at 37° C. Cells were then lysed with lysis buffer containing cAMP-d2 and cAMP cryptate (Cisbio) and incubated for 1 hour at room temperature before fluorescence was measured in an EnVision® plate reader (PerkinElmer).

[4005] cAMP levels for six conjugates (45030-5, 45333-5, 46172-6, 50705-2, 51671-2, and 51672-2) and a positive control (recombinant human glucagon (GCG)) are expressed as a fluorescence ratio of 665/620 nm and shown in FIG. 1A for the CHOK1 cells stably expressing human GCGR.

[4006] Additionally, cAMP levels for conjugate 51671 and a positive control (recombinant human GCG) are shown in FIG. 1B for the primary human hepatocytes expressing human GCGR, where each data point represents the mean of two biological replicates±standard deviation. In addition, cAMP levels for conjugate 51671 and a positive control (recombinant mouse GCG) are shown in FIG. 1C for the primary mouse hepatocytes expressing mouse GCGR, where each data point represents the mean of two biological replicates±standard deviation.

[4007] EC₅₀ values for human GCGR determined using this functional assay with CHOK1 cells stably expressing human GCGR are provided for example conjugates in Table 19.

### Example 2: GLP-1 Receptor Agonist Activity

[4008] The GCGR agonist conjugates disclosed herein are highly selective for the glucagon receptor relative to the GLP-1 receptor. To assess GLP-1 receptor agonist activity for the conjugates, CHOK1 cells stably expressing human GLP-1R were used to measure conjugate-induced cAMP production in a homogeneous time-resolved fluorescence (HTRF) assay (Cisbio, Catalog No. 62AM4PEJ). Serial diluted conjugates were incubated with 40,000 cells in assay buffer (0.1% BSA, 500 pM IBMX in F12 media) for 15 min at 37° C. Cells were then lysed with lysis buffer containing cAMP-d2 and cAMP cryptate (Cisbio) and incubated for 1 hour at room temperature before fluorescence was measured in an EnVision® plate reader (PerkinElmer).

[4009] Representative cAMP levels for six conjugates (45030-5, 45333-5, 46172-6, 50705-2, 51671-2, and 51672-2) and a positive control (recombinant human GLP-1) are expressed as a fluorescence ratio of 665/620 nm and shown in FIG. 2.

[4010] Additionally, EC₅₀ values for human GLP-1 receptor determined using this functional assay are provided for example conjugates in Table 19.

### Example 3: GIPR Antagonist Activity

[4011] HEK 293T cells stably expressing human GIPR and CHO AM1D cells expressing mouse GIPR were used to measure conjugate-induced cAMP generation in a HTRF assay (Cisbio, Catalog No. 62AM4PEJ). Serial diluted conjugates were incubated with 30,000 cells in assay buffer (0.1% BSA, 500 pM IBMX in F12 media) for 30 min at 37° C. before being treated with GIP at final concentration of 50 pM (human GIP) in the HEK 293T human GIPR cells and 90 pM in the CHO AM1D mouse GIPR cells (mouse GIP). Cells were incubated for an additional 30 min at 37° C. and then lysed in lysis buffer containing cAMP-d2 and cAMP cryptate (Cisbio) for 1 hour at room temperature before fluorescence was measured with an EnVision® plate reader (PerkinElmer).

[4012] Representative cAMP levels for six conjugates (45030-5, 45333-5, 46172-6, 50705-2, 51671-2, and 51672-2) and a positive control (recombinant human GIP) are expressed as a fluorescence ratio of 665/620 nm and shown in FIG. 3A for the HEK 293T cells stably expressing the human GIPR. In addition, cAMP levels for conjugate 52398-5 and a positive control (recombinant mouse GIP) are shown in FIG. 3B, where each data point represents the mean of two biological replicates±standard deviation.

[4013] Additionally, IC₅₀ values for human GIPR determined using this functional assay with HEK 293T cells stably expressing the human GIPR are provided for certain example conjugates in Table 19.

### Example 4: KinExA® Analysis of Binding to Human GIPR Extracellular Domain (ECD)

[4014] Binding of the anti-GIPR antagonist/GCGR receptor agonist bispecific conjugate 51671 to human GIPR was measured by a solution equilibrium binding assay using KinExA® 3200 (Sapidyne Instruments Inc., Boise, ID). In brief, 100 mg (dry weight) bis-acrylamide/azlactone copolymer beads (Thermo Scientific (Pierce), Catalog No. 53110) was pre-coated with 50 pg human GIPR ECD in 50 mM Na₂CO₃, pH 9.6 at 4° C. overnight. The ligand protein coated beads were then blocked with 10 mg/mL BSA (Sigma-Aldrich, St. Louis, MO) in 1 M Tris-HCl, pH 8.0 at 4° C. for 2 hours. The beads were then re-suspended in 35 mL beads buffer containing PBS with 0.1 mg/mL BSA, 0.005% v/v P20, and 0.04% sodium azide. Prior to analysis, 30 pM, 100 pM, and 300 pM of conjugate were mixed with increasing concentrations (0.268 pM to 100 nM) of human GIPR ECD and equilibrated for over 8 hours at room temperature in sample buffer containing PBS with 0.1 mg/mL BSA and 0.005% v/v P20. The mixtures were then passed over the GIPR-coated beads. The amount of bead-bound conjugate was quantified using fluorescent Alexa Fluor® 647 labeled goat anti-huFc antibodies (Jackson Immuno Research, West Grove, PA) at 1 μg/mL in SuperBlock™ (Pierce Biotechnology, Inc., Rockford, IL). Since only free conjugate molecules in the mixtures can bind to huGIPR-coated beads, the quantified florescent binding signal is proportional to the concentration of free conjugate at equilibrium with a given GIPR concentration. The dissociation equilibrium constant (K_{D}) was obtained from global nonlinear regression of the “competition” curves using a n-curve one-site homogeneous binding model provided in the KinExA Pro software (Table 20).

TABLE 20
Equilibrium Dissociation Constants
for 51671 Binding to huGIPR ECD

95% Confidence Interval

| huGIPR ECD binding K_{D} [pM] | K_{D} High | K_{D} LOW |
|---|---|---|
| 106 | 134 | 82 |

### Section 3: In Vivo Characterization of GCGR Agonist Conjugate Constructs

[4015] This section provides in vivo characterization data for example GCGR agonist constructs. GCGR agonists conjugated to the anti-GIPR antagonist antibody aGIPR 5G12 SEFL2 E384C were used for murine studies as the anti-GIPR antagonist antibody aGIPR 2G10 SEFL2 E384C does not fully antagonize mouse GIPR at assay-relevant concentrations (Table 21). Molecules comprising aGIPR 5G12 SEFL2 E384C in place of aGIPR 2G10 SEFL2 E384C but the same GCGR agonist peptide and linker can be considered mouse surrogates of the aGIPR 2G10 SEFL2 E384C molecule.

TABLE 21
Comparisons of Mouse and Human In
Vitro GIPR Antagonist Activity

| | | hGIPR IC₅₀ | mGIPR |
|---|---|---|---|
| Identifier | Description | (nM) | IC₅₀ (nM) |
| PL-46818 | GIPR Ab 5G12 | 213.8 | 6.2 |
| PL-48946 | GIPR Ab 2G10 | 91.5 | 1176 |

[4016] Additionally, GCGR agonists conjugated to anti-DNP antibodies were used in certain experiments; the anti-DNP antibody acts as a half-life extending carrier immunoglobulin for its conjugated GCGR agonist and is not expected to contribute to biological activity beyond extension of GCGR agonist half-life.

### Example 5: Body Weight Changes in Diet-Induced Obese (DIO) Mice

[4017] Naïve male C57BL6 mice from Envigo or the Jackson Laboratory were fed a high-fat diet (D12492; Research Diets Inc.) for 14-16 weeks starting at 5-6 weeks of age. Mice were acclimated to all study-related procedures prior to study initiation and were then sorted into treatment groups with equal distribution of body weight (n=7 per group). Mice received intraperitoneal injection of either vehicle (10 mM sodium acetate, 9% sucrose, pH 5.2) or other test articles in 10 mM sodium acetate, 9% sucrose, pH 5.2 at each specified dose level on day 0. Body weight was monitored throughout the study.

[4018] Changes in body weight from baseline are shown in FIG. 4A for ten example GCGR agonists conjugated to anti-DNP antibodies dosed at 3 mg/kg on day 0.

[4019] Changes in body weight from baseline are shown in FIG. 4B for ten example GCGR agonists conjugated to anti-GIPR antibodies dosed at 3 mg/kg on day 0.

[4020] Changes in body weight from baseline are shown in FIG. 4C for nine example GCGR agonists conjugated to anti-GIPR antibodies dosed at 1 mg/kg on day 0.

[4021] Changes in body weight from baseline are shown in FIG. 4D for seven example GCGR agonists conjugated to anti-GIPR antibodies dosed at 1 mg/kg on day 0.

[4022] In general, administration of the conjugates led to reduced body weight in mice with diet-induced obesity.

### Example 6: Body Weight Changes in DIO Mice for a Glucagon (GCG) Receptor Agonist Conjugated to an Anti-DNP Antibody (DNP×GCG) Vs. An Anti-GIPR Antibody (GIPR×GCG)

[4023] Naïve male C57BL6 mice from Envigo were fed a high-fat diet (D12492; Research Diets Inc.) for 15 weeks starting at 5 weeks of age. Mice were acclimated to all study-related procedures prior to study initiation and were then sorted into 3 treatment groups (n=7-8 per group) with equal distribution of body weight. Mice received intraperitoneal injections of either vehicle (10 mM sodium acetate, 9% sucrose, pH 5.2), DNP×GCG 0.5 mg/kg in 10 mM sodium acetate, 9% sucrose, pH 5.2, or GIPR×GCG 0.5 mg/kg in 10 mM sodium acetate, 9% sucrose, pH 5.2 on days 0, 7, and 14 at the same time in the morning.

[4024] DNP×GCG corresponds to conjugate 16746, while GIPR×GCG includes the same GCGR agonist peptide (SEQ ID NO: 1596) and linker (SEQ ID NO: 1629) conjugated to an aGIPR 5G12 SEFL2 E384C antibody.

[4025] Three (3), 24, and 72 hours after each injection, conscious mice were retro-orbitally bled for glucose measurement (FIGS. 5B and 5C). Glucose was measured on handheld glucometer designed for rodent blood (AlphaTRAK®). Body weight was monitored throughout the study (FIG. 5A). The purpose of this study was not to maximize body weight reduction but to compare effects on body weight and glucose levels with anti-GIPR antibody and anti-DNP antibody when conjugated to the same GCG. Data were analyzed by two-way ANOVA using GraphPad Prism software and statistical significance is denoted as *p<0.05, **p<0.01, ***p<0.001 or ****p<0.0001 versus vehicle and +p<0.05, ++p<0.01, +++p<0.001 or ++++p<0.0001 GIPR×GCG versus DNP×GCG.

[4026] One of the primary functions of GIP is to stimulate insulin secretion from pancreatic R cells in a glucose-dependent manner (Dupre et al., J Clin Endocrinol Metab, 37(5), 826-828, 1973). Inhibition of GIPR may lead to a reduction in insulin secretion, which subsequently results in elevated blood glucose levels. Conversely, GCG has an established physiological role as a hormone that increases blood glucose by elevating hepatic glucose production via enhanced glycogen breakdown and stimulation of gluconeogenesis (Jiang & Zhang, Am J Physiol Endocrinol Metab, 284(4), E671-678, 2003). It counterbalances the glucose-lowering effects of insulin, thereby maintaining tight homeostatic control of blood glucose levels across a broad range of metabolic situations (Roder, Wu, Liu, & Han, Exp Mol Med, 48(3), e219, 2016). Consequently, the simultaneous inhibition of GIPR and stimulation of GCGR may lead to an increase in blood glucose levels, given their divergent functions in the regulation of glucose metabolism.

[4027] Unexpectedly, this study revealed that GIPR antagonism counteracted the GCG-induced glucose excursion in obese mice. In this study, the effects of vehicle control, long-acting GCG (DNP×GCG), and GIPR×GCG were compared in diet-induced obese (DIO) mice. The mice treated with GIPR×GCG showed more weight loss than the mice treated with long-acting GCG (FIG. 5A). As expected, the long-acting GCG-treated mice showed an increase in glucose levels when measured at 3 hrs after the first injection (FIG. 5B); however, the increase was not observed after the second or the third injection (FIG. 5C). Surprisingly, the transiently increased glucose levels were ameliorated in the mice treated with GIPR×GCG. Similar results were observed when glucose levels were measured at 24 hrs post each injection. These data suggest that when anti-GIPR antibody is utilized, the conjugate promotes more weight loss compared to GCG alone and counteracts GCG's effects on increasing glucose levels. Taken together, the data suggest that GIPR×GCG not only reduces body weight but also improves glucose homeostasis.

### Example 7: Body Weight, Liver Weight, Fat Mass, Fasting Plasma Glucose, Fasting Plasma Insulin, and Plasma Lipid Profile Changes in DIO Mice

[4028] Naïve male C57BL6 mice from the Jackson Laboratory were fed a high-fat diet (D12492; Research Diets Inc.) for 14 weeks starting at 6 weeks of age. Mice were acclimated to all study-related procedures prior to study initiation and were then sorted into treatment groups with equal distribution of body weight. Mice received intraperitoneal injection of either vehicle (10 mM sodium acetate, 9% sucrose, pH 5.2) or a GIPR×GCG conjugate at 0.5 mg/kg in 10 mM sodium acetate, 9% sucrose, pH 5.2 on day 0 and day 7. Body weight was monitored throughout the study (FIG. 6A). A subcutaneous injection of lactated Ringer's solution was administered to mice as needed with robust weight loss and low food intake per veterinary clinical staff to prevent any dehydration concerns. All mice were bright, alert, and responsive throughout the study. Mice were euthanized after 4-hour fast on day 14 and trunk blood was collected into EDTA tubes for further plasma analysis. Tissue collection and tissue weights included inguinal and epidydimal white adipose tissue and liver.

[4029] Administration of GIPR×GCG conjugates reduced body weight (FIG. 6A) and liver triglycerides (FIG. 6B) in the diet-induced obese (DIO) mice. Additionally, administration of GIPR×GCG conjugates significantly reduced liver weight (FIG. 6C) and fat mass (FIGS. 6D, 6E) in the DIO mice. Moreover, administration of GIPR×GCG conjugates significantly reduced fasting plasma glucose (FIG. 6F) and insulin (FIG. 6G) levels and improved lipid levels (FIGS. 6H-6J) in the DIO mice.

[4030] Data in FIGS. 6B-6J are represented as group mean±standard error of mean (SE). Comparisons between treatment groups and vehicle were performed using a one-way ANOVA with Dunnett's multiple comparisons in GraphPad Prism (*p<0.05, ***p<0.001, ****p<0.0001 vs. vehicle).

### Example 8: Oral Glucose Tolerance Test (OGTT)

[4031] Naïve male C57B16 from the Jackson Laboratory were fed a high-fat diet (D12492; Research Diets Inc.) for 15 weeks starting at 6 weeks of age. Mice were acclimated to all study-related procedures prior to study initiation and were then sorted into 2 treatment groups (n=6-8 per group) with equal distribution of body weight. Mice received intraperitoneal injections of either vehicle (10 mM sodium acetate, 9% sucrose, pH 5.2) or various GIPR×GCG conjugates at 0.75 mg/kg in 10 mM sodium acetate, 9% sucrose, pH 5.2 on day 0, and body weight and food intake were measured on day 0, day 2, and day 4. On day 4, mice were fasted for 6 hours and then conscious mice were retro-orbitally bled for baseline glucose and insulin measurements. Mice then received an oral glucose bolus (1 g/kg) and were bled again 15, 30, and 90-minutes post oral glucose for glucose and insulin measurements. Glucose levels (FIGS. 7A, 7B) were measured on a handheld glucometer designed for rodent blood (AlphaTRAK®), and insulin levels (FIG. 7C, 7D) were measured using a commercial ELISA assay. Terminal blood sample was collected after the 90-minute timepoint for drug concentration measurements. The OGTT occurred 4 days (96 hours) post-treatment. Data were analyzed by two-way ANOVA using GraphPad Prism software and statistical significance is denoted as *p<0.05, **p<0.01, ***p<0.001, ****p<0.0001 versus vehicle. Data in FIGS. 7A-7D are represented as group mean±standard error of mean (SE).

[4032] In FIG. 7A, statistical significance is shown to the left of the first data points at time zero for 39316, 44499, 44959, 44961, and 52398 relative to vehicle in that order from top to bottom. At the 15, 30, and 90 minute timepoints, only 52398 was statistically significant relative to vehicle.

[4033] In FIG. 7C, statistical significance at each time point is plotted above the time point data in order (from top to bottom) of 39316, 44499, 44959, 44961, and 52398 relative to vehicle.

[4034] Improvement in glucose and insulin levels during OGTT was observed with 4-day pre-treatment with GIPR×GCG conjugates.

### Example 9: Combination Treatment with the GLP-1 Agonist Semaglutide

[4035] Naïve male C57B16 mice from the Jackson Laboratory were fed a high-fat diet (D12492; Research Diets Inc.) for 16 weeks starting at 6 weeks of age prior to study initiation. Prior to study start, mice were acclimated to all study-related procedures (handling, weighing, dosing, etc.) and were then randomized into four treatment groups with equal distribution of body weights across all groups.

[4036] The first treatment group received vehicle only. All mice in this treatment group were given a daily subcutaneous injection of PBS as vehicle at 2 mL/kg from day 0 to day 27. On days 18 and 24, all mice were also given an i.p. injection of 10 mM sodium acetate, 9% sucrose, pH 5.2 at 2.5 mL/kg.

[4037] The second treatment group received the GLP-1 agonist semaglutide only throughout the study period. All mice in this treatment group were given a daily subcutaneous injection of semaglutide from day 0 to day 27. The semaglutide dose on day 0 and day 1 was 0.004 mg/kg; from day 2 to day 27, the semaglutide dose was 0.012 mg/kg. On days 18 and 24, this group was also given an i.p. injection of 10 mM sodium acetate, 9% sucrose, pH 5.2 at 2.5 mL/kg.

[4038] The third treatment group received semaglutide for 17 days and then received a GIPR×GCG conjugate (52398) on days 18 and 24. Specifically, all mice in this treatment group were given a daily subcutaneous injection of semaglutide from day 0 to day 17. The semaglutide dose on day 0 and day 1 was 0.004 mg/kg; from day 2 to day 17, the semaglutide dose was 0.012 mg/kg. On days 18 and 24, mice were given an i.p. injection of 0.5 mg/kg of 52398.

[4039] The fourth treatment group received semaglutide for 27 days and also received a GIPR×GCG conjugate (52398) on days 18 and 24. Specifically, all mice in this treatment group were given a daily subcutaneous injection of semaglutide from day 0 to day 27. The semaglutide dose on day 0 and day 1 was 0.004 mg/kg; from day 2 to day 27, the semaglutide dose was 0.012 mg/kg. On day 18 and day 24, the mice were also given an i.p. injection of 52398. On day 18, mice received 0.5 mg/kg of 52398. On day 24, mice received a lower dose of 52398 (0.25 mg/kg) due to robust body weight reduction.

[4040] Body weight and food intake measurements were recorded throughout the study, and injections were given at approximately 8 AM each day. A subcutaneous injection of lactated Ringer's solution was administered to mice as needed with robust weight loss and low food intake per veterinary clinical staff to prevent any dehydration concerns. All mice were bright, alert, and responsive throughout the study. Mice were euthanized after 4-hour fast on day 28 and trunk blood was collected into EDTA tubes for further plasma analysis. Tissue collection and tissue weights included inguinal (ING) white adipose tissue (WAT) (subcutaneous), epidydimal (EPI) WAT (visceral), kidney (paired weights), liver, and brain.

[4041] Combination therapy, with sequential or simultaneous semaglutide dosing, led to improved body weight reduction (FIG. 8A), reduced food intake (FIG. 8B), a trend toward reduced white adipose depots (FIGS. 8C, 8D), reduced liver (FIG. 8E) and kidney (FIG. 8F) weights without reduction in brain weight (FIG. 8G), improved lipid profiles (FIGS. 8H-8K), and improved plasma glucose (FIG. 8L) and insulin (FIG. 8M) levels in the DIO mice.

[4042] Data in FIGS. 8A-8M are represented as group mean±SE. Comparative statistics were not run for the data represented in FIGS. 8A and 8B. For FIG. 8B, no food intake values were collected for semaglutide in combination with 52398 on day 8 because all treated mice exhibited food shredding behavior in which mice shred high fat pellets and food intake could not be measured. Comparisons between treatment groups were performed for the data represented in FIGS. 8C-8M using a one-way ANOVA with Tukey's multiple comparisons test in GraphPad Prism (*p<0.05, **p<0.01, ***p<0.001, ****p<0.0001).

[4043] The section headings used herein are for organizational purposes only and are not to be construed as limiting the subject matter described.

[4044] All documents, or portions of documents, cited in this application, including but not limited to patents, patent applications, articles, books, and treatises, are hereby expressly incorporated by reference. What is described in an embodiment of the disclosure can be combined with one or more other embodiments of the disclosure unless context clearly indicates otherwise.

[4045] The disclosed subject matter is not intended to be limited in scope by the specific embodiments described herein, which are instead intended as non-limiting illustrations of individual aspects of the disclosure. Functionally equivalent methods and components are within the scope of the disclosure. Indeed, various modifications of the disclosed subject matter, in addition to those shown and described herein, will be apparent to those skilled in the art from the foregoing description and accompanying drawing(s). Such modifications are intended to fall within the scope of the disclosed subject matter.

[4046] The descriptions of the various embodiments and/or examples of the disclosed subject matter have been presented for purposes of illustration, but are not intended to be exhaustive or limiting in any way. Many modifications and variations will be apparent to those of ordinary skill in the art without departing from the scope and spirit of the described embodiments. The terminology used herein was chosen to best explain the principles of the embodiments, the practical application or technical improvement over technologies found in the marketplace, and/or to enable others of ordinary skill in the art to understand the disclosed subject matter.

What is claimed is:

1. A molecule comprising:
a first polypeptide that agonizes a glucagon receptor (“GCGR”); and
an antibody that specifically binds to a glucose-dependent insulinotropic polypeptide receptor (“GIPR”).

2. The molecule of claim 1, wherein:
an ε-amino group of a lysine residue of the first polypeptide is covalently linked to a C-terminus of a first linker polypeptide; and
an N-terminus of the first linker polypeptide is conjugated to a cysteine residue of the antibody.

3. The molecule of claim 1, wherein:
a C-terminal amino acid residue of the first polypeptide is covalently linked to a N-terminal amino acid of a first linker polypeptide; and
a C-terminal amino acid residue of the first linker polypeptide is conjugated to a cysteine residue of the antibody.

4. The molecule of any one of claims 1-3, wherein the first polypeptide is glucagon or a glucagon analog.

5. The molecule of any one of claims 1-4, wherein the first polypeptide comprises the amino acid sequence of any one of SEQ ID NOs: 1587-1627, 1747-1840, 1859-1862, or 1879-1881.

6. The molecule of any one of claims 1-5, wherein the first polypeptide comprises the amino acid sequence of any one of SEQ ID NOs: 1587-1627 or 1747.

7. The molecule of any one of claims 1-5, wherein the first polypeptide comprises the amino acid sequence of any one of SEQ ID NOs: 1587, 1592, 1596, 1615, 1626, 1818, 1822, 1825, or 1826.

8. The molecule of any one of claims 1-5 or 7, wherein the first polypeptide comprises the amino acid sequence of any one of SEQ ID NOs: 1626, 1818, 1822, 1825, or 1826.

9. The molecule of any one of claims 1-8, wherein the first linker polypeptide comprises the amino acid sequence of any one of SEQ ID NOs: 1628-1683, 1739-1746, or 1841-1852.

10. The molecule of any one of claims 1-9, wherein the first linker polypeptide comprises the amino acid sequence of any one of SEQ ID NOs: 1628-1683.

11. The molecule of any one of claims 1-10, wherein the first linker polypeptide comprises the amino acid sequence of any one of SEQ ID NOs: 1628-1630.

12. The molecule of claim 2, wherein:
the first polypeptide comprises the amino acid sequence of any one of SEQ ID NOs: 1587-1627, 1747-1749, 1751-1792, 1794-1798, 1801-1830, 1833-1840, 1859-1862, or 1879-1881; and
the first polypeptide linker comprises the amino acid sequence of any one of SEQ ID NOs: 1628-1683, 1739, 1850, or 1851.

13. The molecule of claim 3, wherein:
the first polypeptide comprises the amino acid sequence of any one of SEQ ID NOs: 1793, 1799, 1800, 1831, or 1832; and
the first polypeptide linker comprises the amino acid sequence of any one of SEQ ID NOs: 1740-1746, 1841-1849, or 1852.

14. The molecule of any one of claims 2-12, wherein the cysteine residue of the antibody that is conjugated to the first linker polypeptide is at a position selected from the group consisting of 88 of a light chain, 384 of a heavy chain, and 487 of a heavy chain, according to AHo numbering.

15. The molecule of any one of claims 1-14, further comprising a second polypeptide that agonizes a GCGR.

16. The molecule of claim 15, wherein:
an ε-amino group of a lysine residue of the second polypeptide is covalently linked to a C-terminus of a second linker polypeptide; and
an N-terminus of the second linker polypeptide is conjugated to a cysteine residue of the antibody.

17. The molecule of claim 15, wherein:
a C-terminal amino acid residue of the second polypeptide is covalently linked to a N-terminal amino acid of a second linker polypeptide; and
a C-terminal amino acid residue of the second linker polypeptide is conjugated to a cysteine residue of the antibody.

18. The molecule of any one of claims 15-17, wherein the second polypeptide comprises the amino acid sequence of any one of SEQ ID NOs: 1587-1627, 1747-1840, 1859-1862, or 1879-1881.

19. The molecule of any one of claims 15-18, wherein the second polypeptide comprises the amino acid sequence of any one of SEQ ID NOs: 1587-1627 or 1747.

20. The molecule of any one of claims 15-18, wherein the second polypeptide comprises the amino acid sequence of any one of SEQ ID NOs: 1587, 1592, 1596, 1615, 1626, 1818, 1822, 1825, or 1826.

21. The molecule of any one of claims 15-18 or 20, wherein the second polypeptide comprises the amino acid sequence of any one of SEQ ID NOs: 1626, 1818, 1822, 1825, or 1826.

22. The molecule of any one of claims 15-21, wherein the first polypeptide has the same amino acid sequence as the second polypeptide.

23. The molecule of any one of claims 15-22, wherein the second linker polypeptide comprises the amino acid sequence of any one of SEQ ID NOs: 1628-1683, 1739-1746, or 1841-1852.

24. The molecule of any one of claims 15-23, wherein the second linker polypeptide comprises the amino acid sequence of any one of SEQ ID NOs: 1628-1683.

25. The molecule of any one of claims 15-24, wherein the second linker polypeptide comprises the amino acid sequence of any one of SEQ ID NOs: 1628-1630.

26. The molecule of any one of claims 15-25, wherein the first linker polypeptide has the same amino acid sequence as the second linker polypeptide.

27. The molecule of any one of claims 15-26, wherein the cysteine residue of the antibody that is conjugated to the second linker polypeptide is at a position selected from the group consisting of 88 of a light chain, 384 of a heavy chain, and 487 of a heavy chain, according to AHo numbering.

28. The molecule of any one of claims 1-27, wherein the antibody comprises a CDRL1, a CDRL2, a CDRL3, a CDRH1, a CDRH2, and a CDRH3, wherein the CDRL1, the CDRL2, the CDRL3, the CDRH1, the CDRH2, and the CDRH3 comprise amino acid sequences selected from:
i. SEQ ID NO: 629, SEQ ID NO: 786, SEQ ID NO: 943, SEQ ID NO: 1100, SEQ ID NO: 1257, and SEQ ID NO: 1414, respectively;
ii. SEQ ID NO: 630, SEQ ID NO: 787, SEQ ID NO: 944, SEQ ID NO: 1101, SEQ ID NO: 1258, and SEQ ID NO: 1415, respectively;
iii. SEQ ID NO: 631, SEQ ID NO: 788, SEQ ID NO: 945, SEQ ID NO: 1102, SEQ ID NO: 1259, and SEQ ID NO: 1416, respectively;
iv. SEQ ID NO: 632, SEQ ID NO: 789, SEQ ID NO: 946, SEQ ID NO: 1103, SEQ ID NO: 1260, and SEQ ID NO: 1417, respectively;
v. SEQ ID NO: 633, SEQ ID NO: 790, SEQ ID NO: 947, SEQ ID NO: 1104, SEQ ID NO: 1261, and SEQ ID NO: 1418, respectively;
vi. SEQ ID NO: 634, SEQ ID NO: 791, SEQ ID NO: 948, SEQ ID NO: 1105, SEQ ID NO: 1262, and SEQ ID NO: 1419, respectively;
vii. SEQ ID NO: 635, SEQ ID NO: 792, SEQ ID NO: 949, SEQ ID NO: 1106, SEQ ID NO: 1263, and SEQ ID NO: 1420, respectively;
viii. SEQ ID NO: 636, SEQ ID NO: 793, SEQ ID NO: 950, SEQ ID NO: 1107, SEQ ID NO: 1264, and SEQ ID NO: 1421, respectively;
ix. SEQ ID NO: 637, SEQ ID NO: 794, SEQ ID NO: 951, SEQ ID NO: 1108, SEQ ID NO: 1265, and SEQ ID NO: 1422, respectively;
x. SEQ ID NO: 638, SEQ ID NO: 795, SEQ ID NO: 952, SEQ ID NO: 1109, SEQ ID NO: 1266, and SEQ ID NO: 1423, respectively;
xi. SEQ ID NO: 639, SEQ ID NO: 796, SEQ ID NO: 953, SEQ ID NO: 1110, SEQ ID NO: 1267, and SEQ ID NO: 1424, respectively;
xii. SEQ ID NO: 640, SEQ ID NO: 797, SEQ ID NO: 954, SEQ ID NO: 1111, SEQ ID NO: 1268, and SEQ ID NO: 1425, respectively;
xiii. SEQ ID NO: 641, SEQ ID NO: 798, SEQ ID NO: 955, SEQ ID NO: 1112, SEQ ID NO: 1269, and SEQ ID NO: 1426, respectively;
xiv. SEQ ID NO: 642, SEQ ID NO: 799, SEQ ID NO: 956, SEQ ID NO: 1113, SEQ ID NO: 1270, and SEQ ID NO: 1427, respectively;
xv. SEQ ID NO: 643, SEQ ID NO: 800, SEQ ID NO: 957, SEQ ID NO: 1114, SEQ ID NO: 1271, and SEQ ID NO: 1428, respectively;
xvi. SEQ ID NO: 644, SEQ ID NO: 801, SEQ ID NO: 958, SEQ ID NO: 1115, SEQ ID NO: 1272, and SEQ ID NO: 1429, respectively;
xvii. SEQ ID NO: 645, SEQ ID NO: 802, SEQ ID NO: 959, SEQ ID NO: 1116, SEQ ID NO: 1273, and SEQ ID NO: 1430, respectively;
xviii. SEQ ID NO: 646, SEQ ID NO: 803, SEQ ID NO: 960, SEQ ID NO: 1117, SEQ ID NO: 1274, and SEQ ID NO: 1431, respectively;
xix. SEQ ID NO: 647, SEQ ID NO: 804, SEQ ID NO: 961, SEQ ID NO: 1118, SEQ ID NO: 1275, and SEQ ID NO: 1432, respectively;
xx. SEQ ID NO: 648, SEQ ID NO: 805, SEQ ID NO: 962, SEQ ID NO: 1119, SEQ ID NO: 1276, and SEQ ID NO: 1433, respectively;
xxi. SEQ ID NO: 649, SEQ ID NO: 806, SEQ ID NO: 963, SEQ ID NO: 1120, SEQ ID NO: 1277, and SEQ ID NO: 1434, respectively;
xxii. SEQ ID NO: 650, SEQ ID NO: 807, SEQ ID NO: 964, SEQ ID NO: 1121, SEQ ID NO: 1278, and SEQ ID NO: 1435, respectively;
xxiii. SEQ ID NO: 651, SEQ ID NO: 808, SEQ ID NO: 965, SEQ ID NO: 1122, SEQ ID NO: 1279, and SEQ ID NO: 1436, respectively;
xxiv. SEQ ID NO: 652, SEQ ID NO: 809, SEQ ID NO: 966, SEQ ID NO: 1123, SEQ ID NO: 1280, and SEQ ID NO: 1437, respectively;
xxv. SEQ ID NO: 653, SEQ ID NO: 810, SEQ ID NO: 967, SEQ ID NO: 1124, SEQ ID NO: 1281, and SEQ ID NO: 1438, respectively;
xxvi. SEQ ID NO: 654, SEQ ID NO: 811, SEQ ID NO: 968, SEQ ID NO: 1125, SEQ ID NO: 1282, and SEQ ID NO: 1439, respectively;
xxvii. SEQ ID NO: 655, SEQ ID NO: 812, SEQ ID NO: 969, SEQ ID NO: 1126, SEQ ID NO: 1283, and SEQ ID NO: 1440, respectively;
xxviii. SEQ ID NO: 656, SEQ ID NO: 813, SEQ ID NO: 970, SEQ ID NO: 1127, SEQ ID NO: 1284, and SEQ ID NO: 1441, respectively;
xxix. SEQ ID NO: 657, SEQ ID NO: 814, SEQ ID NO: 971, SEQ ID NO: 1128, SEQ ID NO: 1285, and SEQ ID NO: 1442, respectively;
xxx. SEQ ID NO: 658, SEQ ID NO: 815, SEQ ID NO: 972, SEQ ID NO: 1129, SEQ ID NO: 1286, and SEQ ID NO: 1443, respectively;
xxxi. SEQ ID NO: 659, SEQ ID NO: 816, SEQ ID NO: 973, SEQ ID NO: 1130, SEQ ID NO: 1287, and SEQ ID NO: 1444, respectively;
xxxii. SEQ ID NO: 660, SEQ ID NO: 817, SEQ ID NO: 974, SEQ ID NO: 1131, SEQ ID NO: 1288, and SEQ ID NO: 1445, respectively;
xxxiii. SEQ ID NO: 661, SEQ ID NO: 818, SEQ ID NO: 975, SEQ ID NO: 1132, SEQ ID NO: 1289, and SEQ ID NO: 1446, respectively;
xxxiv. SEQ ID NO: 662, SEQ ID NO: 819, SEQ ID NO: 976, SEQ ID NO: 1133, SEQ ID NO: 1290, and SEQ ID NO: 1447, respectively;
xxxv. SEQ ID NO: 663, SEQ ID NO: 820, SEQ ID NO: 977, SEQ ID NO: 1134, SEQ ID NO: 1291, and SEQ ID NO: 1448, respectively;
xxxvi. SEQ ID NO: 664, SEQ ID NO: 821, SEQ ID NO: 978, SEQ ID NO: 1135, SEQ ID NO: 1292, and SEQ ID NO: 1449, respectively;
xxxvii. SEQ ID NO: 665, SEQ ID NO: 822, SEQ ID NO: 979, SEQ ID NO: 1136, SEQ ID NO: 1293, and SEQ ID NO: 1450, respectively;
xxxviii. SEQ ID NO: 666, SEQ ID NO: 823, SEQ ID NO: 980, SEQ ID NO: 1137, SEQ ID NO: 1294, and SEQ ID NO: 1451, respectively;
xxxix. SEQ ID NO: 667, SEQ ID NO: 824, SEQ ID NO: 981, SEQ ID NO: 1138, SEQ ID NO: 1295, and SEQ ID NO: 1452, respectively;
xl. SEQ ID NO: 668, SEQ ID NO: 825, SEQ ID NO: 982, SEQ ID NO: 1139, SEQ ID NO: 1296, and SEQ ID NO: 1453, respectively;
xli. SEQ ID NO: 669, SEQ ID NO: 826, SEQ ID NO: 983, SEQ ID NO: 1140, SEQ ID NO: 1297, and SEQ ID NO: 1454, respectively;
xlii. SEQ ID NO: 670, SEQ ID NO: 827, SEQ ID NO: 984, SEQ ID NO: 1141, SEQ ID NO: 1298, and SEQ ID NO: 1455, respectively;
xliii. SEQ ID NO: 671, SEQ ID NO: 828, SEQ ID NO: 985, SEQ ID NO: 1142, SEQ ID NO: 1299, and SEQ ID NO: 1456, respectively;
xliv. SEQ ID NO: 672, SEQ ID NO: 829, SEQ ID NO: 986, SEQ ID NO: 1143, SEQ ID NO: 1300, and SEQ ID NO: 1457, respectively;
xlv. SEQ ID NO: 673, SEQ ID NO: 830, SEQ ID NO: 987, SEQ ID NO: 1144, SEQ ID NO: 1301, and SEQ ID NO: 1458, respectively;
xlvi. SEQ ID NO: 674, SEQ ID NO: 831, SEQ ID NO: 988, SEQ ID NO: 1145, SEQ ID NO: 1302, and SEQ ID NO: 1459, respectively;
xlvii. SEQ ID NO: 675, SEQ ID NO: 832, SEQ ID NO: 989, SEQ ID NO: 1146, SEQ ID NO: 1303, and SEQ ID NO: 1460, respectively;
xlviii. SEQ ID NO: 676, SEQ ID NO: 833, SEQ ID NO: 990, SEQ ID NO: 1147, SEQ ID NO: 1304, and SEQ ID NO: 1461, respectively;
xlix. SEQ ID NO: 677, SEQ ID NO: 834, SEQ ID NO: 991, SEQ ID NO: 1148, SEQ ID NO: 1305, and SEQ ID NO: 1462, respectively;
l. SEQ ID NO: 678, SEQ ID NO: 835, SEQ ID NO: 992, SEQ ID NO: 1149, SEQ ID NO: 1306, and SEQ ID NO: 1463, respectively;
li. SEQ ID NO: 679, SEQ ID NO: 836, SEQ ID NO: 993, SEQ ID NO: 1150, SEQ ID NO: 1307, and SEQ ID NO: 1464, respectively;
lii. SEQ ID NO: 680, SEQ ID NO: 837, SEQ ID NO: 994, SEQ ID NO: 1151, SEQ ID NO: 1308, and SEQ ID NO: 1465, respectively;
liii. SEQ ID NO: 681, SEQ ID NO: 838, SEQ ID NO: 995, SEQ ID NO: 1152, SEQ ID NO: 1309, and SEQ ID NO: 1466, respectively;
liv. SEQ ID NO: 682, SEQ ID NO: 839, SEQ ID NO: 996, SEQ ID NO: 1153, SEQ ID NO: 1310, and SEQ ID NO: 1467, respectively;
lv. SEQ ID NO: 683, SEQ ID NO: 840, SEQ ID NO: 997, SEQ ID NO: 1154, SEQ ID NO: 1311, and SEQ ID NO: 1468, respectively;
lvi. SEQ ID NO: 684, SEQ ID NO: 841, SEQ ID NO: 998, SEQ ID NO: 1155, SEQ ID NO: 1312, and SEQ ID NO: 1469, respectively;
lvii. SEQ ID NO: 685, SEQ ID NO: 842, SEQ ID NO: 999, SEQ ID NO: 1156, SEQ ID NO: 1313, and SEQ ID NO: 1470, respectively;
lviii. SEQ ID NO: 686, SEQ ID NO: 843, SEQ ID NO: 1000, SEQ ID NO: 1157, SEQ ID NO: 1314, and SEQ ID NO: 1471, respectively;
lix. SEQ ID NO: 687, SEQ ID NO: 844, SEQ ID NO: 1001, SEQ ID NO: 1158, SEQ ID NO: 1315, and SEQ ID NO: 1472, respectively;
lx. SEQ ID NO: 688, SEQ ID NO: 845, SEQ ID NO: 1002, SEQ ID NO: 1159, SEQ ID NO: 1316, and SEQ ID NO: 1473, respectively;
lxi. SEQ ID NO: 689, SEQ ID NO: 846, SEQ ID NO: 1003, SEQ ID NO: 1160, SEQ ID NO: 1317, and SEQ ID NO: 1474, respectively;
lxii. SEQ ID NO: 690, SEQ ID NO: 847, SEQ ID NO: 1004, SEQ ID NO: 1161, SEQ ID NO: 1318, and SEQ ID NO: 1475, respectively;
lxiii. SEQ ID NO: 691, SEQ ID NO: 848, SEQ ID NO: 1005, SEQ ID NO: 1162, SEQ ID NO: 1319, and SEQ ID NO: 1476, respectively;
lxiv. SEQ ID NO: 692, SEQ ID NO: 849, SEQ ID NO: 1006, SEQ ID NO: 1163, SEQ ID NO: 1320, and SEQ ID NO: 1477, respectively;
lxv. SEQ ID NO: 693, SEQ ID NO: 850, SEQ ID NO: 1007, SEQ ID NO: 1164, SEQ ID NO: 1321, and SEQ ID NO: 1478, respectively;
lxvi. SEQ ID NO: 694, SEQ ID NO: 851, SEQ ID NO: 1008, SEQ ID NO: 1165, SEQ ID NO: 1322, and SEQ ID NO: 1479, respectively;
lxvii. SEQ ID NO: 695, SEQ ID NO: 852, SEQ ID NO: 1009, SEQ ID NO: 1166, SEQ ID NO: 1323, and SEQ ID NO: 1480, respectively;
lxviii. SEQ ID NO: 696, SEQ ID NO: 853, SEQ ID NO: 1010, SEQ ID NO: 1167, SEQ ID NO: 1324, and SEQ ID NO: 1481, respectively;
lxix. SEQ ID NO: 697, SEQ ID NO: 854, SEQ ID NO: 1011, SEQ ID NO: 1168, SEQ ID NO: 1325, and SEQ ID NO: 1482, respectively;
lxx. SEQ ID NO: 698, SEQ ID NO: 855, SEQ ID NO: 1012, SEQ ID NO: 1169, SEQ ID NO: 1326, and SEQ ID NO: 1483, respectively;
lxxi. SEQ ID NO: 699, SEQ ID NO: 856, SEQ ID NO: 1013, SEQ ID NO: 1170, SEQ ID NO: 1327, and SEQ ID NO: 1484, respectively;
lxxii. SEQ ID NO: 700, SEQ ID NO: 857, SEQ ID NO: 1014, SEQ ID NO: 1171, SEQ ID NO: 1328, and SEQ ID NO: 1485, respectively;
lxxiii. SEQ ID NO: 701, SEQ ID NO: 858, SEQ ID NO: 1015, SEQ ID NO: 1172, SEQ ID NO: 1329, and SEQ ID NO: 1486, respectively;
lxxiv. SEQ ID NO: 702, SEQ ID NO: 859, SEQ ID NO: 1016, SEQ ID NO: 1173, SEQ ID NO: 1330, and SEQ ID NO: 1487, respectively;
lxxv. SEQ ID NO: 703, SEQ ID NO: 860, SEQ ID NO: 1017, SEQ ID NO: 1174, SEQ ID NO: 1331, and SEQ ID NO: 1488, respectively;
lxxvi. SEQ ID NO: 704, SEQ ID NO: 861, SEQ ID NO: 1018, SEQ ID NO: 1175, SEQ ID NO: 1332, and SEQ ID NO: 1489, respectively;
lxxvii. SEQ ID NO: 705, SEQ ID NO: 862, SEQ ID NO: 1019, SEQ ID NO: 1176, SEQ ID NO: 1333, and SEQ ID NO: 1490, respectively;
lxxviii. SEQ ID NO: 706, SEQ ID NO: 863, SEQ ID NO: 1020, SEQ ID NO: 1177, SEQ ID NO: 1334, and SEQ ID NO: 1491, respectively;
lxxix. SEQ ID NO: 707, SEQ ID NO: 864, SEQ ID NO: 1021, SEQ ID NO: 1178, SEQ ID NO: 1335, and SEQ ID NO: 1492, respectively;
lxxx. SEQ ID NO: 708, SEQ ID NO: 865, SEQ ID NO: 1022, SEQ ID NO: 1179, SEQ ID NO: 1336, and SEQ ID NO: 1493, respectively;
lxxxi. SEQ ID NO: 709, SEQ ID NO: 866, SEQ ID NO: 1023, SEQ ID NO: 1180, SEQ ID NO: 1337, and SEQ ID NO: 1494, respectively;
lxxxii. SEQ ID NO: 710, SEQ ID NO: 867, SEQ ID NO: 1024, SEQ ID NO: 1181, SEQ ID NO: 1338, and SEQ ID NO: 1495, respectively;
lxxxiii. SEQ ID NO: 711, SEQ ID NO: 868, SEQ ID NO: 1025, SEQ ID NO: 1182, SEQ ID NO: 1339, and SEQ ID NO: 1496, respectively;
lxxxiv. SEQ ID NO: 712, SEQ ID NO: 869, SEQ ID NO: 1026, SEQ ID NO: 1183, SEQ ID NO: 1340, and SEQ ID NO: 1497, respectively;
lxxxv. SEQ ID NO: 713, SEQ ID NO: 870, SEQ ID NO: 1027, SEQ ID NO: 1184, SEQ ID NO: 1341, and SEQ ID NO: 1498, respectively;
lxxxvi. SEQ ID NO: 714, SEQ ID NO: 871, SEQ ID NO: 1028, SEQ ID NO: 1185, SEQ ID NO: 1342, and SEQ ID NO: 1499, respectively;
lxxxvii. SEQ ID NO: 715, SEQ ID NO: 872, SEQ ID NO: 1029, SEQ ID NO: 1186, SEQ ID NO: 1343, and SEQ ID NO: 1500, respectively;
lxxxviii. SEQ ID NO: 716, SEQ ID NO: 873, SEQ ID NO: 1030, SEQ ID NO: 1187, SEQ ID NO: 1344, and SEQ ID NO: 1501, respectively;
lxxxix. SEQ ID NO: 717, SEQ ID NO: 874, SEQ ID NO: 1031, SEQ ID NO: 1188, SEQ ID NO: 1345, and SEQ ID NO: 1502, respectively;
xc. SEQ ID NO: 718, SEQ ID NO: 875, SEQ ID NO: 1032, SEQ ID NO: 1189, SEQ ID NO: 1346, and SEQ ID NO: 1503, respectively;
xci. SEQ ID NO: 719, SEQ ID NO: 876, SEQ ID NO: 1033, SEQ ID NO: 1190, SEQ ID NO: 1347, and SEQ ID NO: 1504, respectively;
xcii. SEQ ID NO: 720, SEQ ID NO: 877, SEQ ID NO: 1034, SEQ ID NO: 1191, SEQ ID NO: 1348, and SEQ ID NO: 1505, respectively;
xciii. SEQ ID NO: 721, SEQ ID NO: 878, SEQ ID NO: 1035, SEQ ID NO: 1192, SEQ ID NO: 1349, and SEQ ID NO: 1506, respectively;
xciv. SEQ ID NO: 722, SEQ ID NO: 879, SEQ ID NO: 1036, SEQ ID NO: 1193, SEQ ID NO: 1350, and SEQ ID NO: 1507, respectively;
xcv. SEQ ID NO: 723, SEQ ID NO: 880, SEQ ID NO: 1037, SEQ ID NO: 1194, SEQ ID NO: 1351, and SEQ ID NO: 1508, respectively;
xcvi. SEQ ID NO: 724, SEQ ID NO: 881, SEQ ID NO: 1038, SEQ ID NO: 1195, SEQ ID NO: 1352, and SEQ ID NO: 1509, respectively;
xcvii. SEQ ID NO: 725, SEQ ID NO: 882, SEQ ID NO: 1039, SEQ ID NO: 1196, SEQ ID NO: 1353, and SEQ ID NO: 1510, respectively;
xcviii. SEQ ID NO: 726, SEQ ID NO: 883, SEQ ID NO: 1040, SEQ ID NO: 1197, SEQ ID NO: 1354, and SEQ ID NO: 1511, respectively;
xcix. SEQ ID NO: 727, SEQ ID NO: 884, SEQ ID NO: 1041, SEQ ID NO: 1198, SEQ ID NO: 1355, and SEQ ID NO: 1512, respectively;
c. SEQ ID NO: 728, SEQ ID NO: 885, SEQ ID NO: 1042, SEQ ID NO: 1199, SEQ ID NO: 1356, and SEQ ID NO: 1513, respectively;
ci. SEQ ID NO: 729, SEQ ID NO: 886, SEQ ID NO: 1043, SEQ ID NO: 1200, SEQ ID NO: 1357, and SEQ ID NO: 1514, respectively;
cii. SEQ ID NO: 730, SEQ ID NO: 887, SEQ ID NO: 1044, SEQ ID NO: 1201, SEQ ID NO: 1358, and SEQ ID NO: 1515, respectively;
ciii. SEQ ID NO: 731, SEQ ID NO: 888, SEQ ID NO: 1045, SEQ ID NO: 1202, SEQ ID NO: 1359, and SEQ ID NO: 1516, respectively;
civ. SEQ ID NO: 732, SEQ ID NO: 889, SEQ ID NO: 1046, SEQ ID NO: 1203, SEQ ID NO: 1360, and SEQ ID NO: 1517, respectively;
cv. SEQ ID NO: 733, SEQ ID NO: 890, SEQ ID NO: 1047, SEQ ID NO: 1204, SEQ ID NO: 1361, and SEQ ID NO: 1518, respectively;
cvi. SEQ ID NO: 734, SEQ ID NO: 891, SEQ ID NO: 1048, SEQ ID NO: 1205, SEQ ID NO: 1362, and SEQ ID NO: 1519, respectively;
cvii. SEQ ID NO: 735, SEQ ID NO: 892, SEQ ID NO: 1049, SEQ ID NO: 1206, SEQ ID NO: 1363, and SEQ ID NO: 1520, respectively;
cviii. SEQ ID NO: 736, SEQ ID NO: 893, SEQ ID NO: 1050, SEQ ID NO: 1207, SEQ ID NO: 1364, and SEQ ID NO: 1521, respectively;
cix. SEQ ID NO: 737, SEQ ID NO: 894, SEQ ID NO: 1051, SEQ ID NO: 1208, SEQ ID NO: 1365, and SEQ ID NO: 1522, respectively;
cx. SEQ ID NO: 738, SEQ ID NO: 895, SEQ ID NO: 1052, SEQ ID NO: 1209, SEQ ID NO: 1366, and SEQ ID NO: 1523, respectively;
cxi. SEQ ID NO: 739, SEQ ID NO: 896, SEQ ID NO: 1053, SEQ ID NO: 1210, SEQ ID NO: 1367, and SEQ ID NO: 1524, respectively;
cxii. SEQ ID NO: 740, SEQ ID NO: 897, SEQ ID NO: 1054, SEQ ID NO: 1211, SEQ ID NO: 1368, and SEQ ID NO: 1525, respectively;
cxiii. SEQ ID NO: 741, SEQ ID NO: 898, SEQ ID NO: 1055, SEQ ID NO: 1212, SEQ ID NO: 1369, and SEQ ID NO: 1526, respectively;
cxiv. SEQ ID NO: 742, SEQ ID NO: 899, SEQ ID NO: 1056, SEQ ID NO: 1213, SEQ ID NO: 1370, and SEQ ID NO: 1527, respectively;
cxv. SEQ ID NO: 743, SEQ ID NO: 900, SEQ ID NO: 1057, SEQ ID NO: 1214, SEQ ID NO: 1371, and SEQ ID NO: 1528, respectively;
cxvi. SEQ ID NO: 744, SEQ ID NO: 901, SEQ ID NO: 1058, SEQ ID NO: 1215, SEQ ID NO: 1372, and SEQ ID NO: 1529, respectively;
cxvii. SEQ ID NO: 745, SEQ ID NO: 902, SEQ ID NO: 1059, SEQ ID NO: 1216, SEQ ID NO: 1373, and SEQ ID NO: 1530, respectively;
cxviii. SEQ ID NO: 746, SEQ ID NO: 903, SEQ ID NO: 1060, SEQ ID NO: 1217, SEQ ID NO: 1374, and SEQ ID NO: 1531, respectively;
cxix. SEQ ID NO: 747, SEQ ID NO: 904, SEQ ID NO: 1061, SEQ ID NO: 1218, SEQ ID NO: 1375, and SEQ ID NO: 1532, respectively;
cxx. SEQ ID NO: 748, SEQ ID NO: 905, SEQ ID NO: 1062, SEQ ID NO: 1219, SEQ ID NO: 1376, and SEQ ID NO: 1533, respectively;
cxxi. SEQ ID NO: 749, SEQ ID NO: 906, SEQ ID NO: 1063, SEQ ID NO: 1220, SEQ ID NO: 1377, and SEQ ID NO: 1534, respectively;
cxxii. SEQ ID NO: 750, SEQ ID NO: 907, SEQ ID NO: 1064, SEQ ID NO: 1221, SEQ ID NO: 1378, and SEQ ID NO: 1535, respectively;
cxxiii. SEQ ID NO: 751, SEQ ID NO: 908, SEQ ID NO: 1065, SEQ ID NO: 1222, SEQ ID NO: 1379, and SEQ ID NO: 1536, respectively;
cxxiv. SEQ ID NO: 752, SEQ ID NO: 909, SEQ ID NO: 1066, SEQ ID NO: 1223, SEQ ID NO: 1380, and SEQ ID NO: 1537, respectively;
cxxv. SEQ ID NO: 753, SEQ ID NO: 910, SEQ ID NO: 1067, SEQ ID NO: 1224, SEQ ID NO: 1381, and SEQ ID NO: 1538, respectively;
cxxvi. SEQ ID NO: 754, SEQ ID NO: 911, SEQ ID NO: 1068, SEQ ID NO: 1225, SEQ ID NO: 1382, and SEQ ID NO: 1539, respectively;
cxxvii. SEQ ID NO: 755, SEQ ID NO: 912, SEQ ID NO: 1069, SEQ ID NO: 1226, SEQ ID NO: 1383, and SEQ ID NO: 1540, respectively;
cxxviii. SEQ ID NO: 756, SEQ ID NO: 913, SEQ ID NO: 1070, SEQ ID NO: 1227, SEQ ID NO: 1384, and SEQ ID NO: 1541, respectively;
cxxix. SEQ ID NO: 757, SEQ ID NO: 914, SEQ ID NO: 1071, SEQ ID NO: 1228, SEQ ID NO: 1385, and SEQ ID NO: 1542, respectively;
cxxx. SEQ ID NO: 758, SEQ ID NO: 915, SEQ ID NO: 1072, SEQ ID NO: 1229, SEQ ID NO: 1386, and SEQ ID NO: 1543, respectively;
cxxxi. SEQ ID NO: 759, SEQ ID NO: 916, SEQ ID NO: 1073, SEQ ID NO: 1230, SEQ ID NO: 1387, and SEQ ID NO: 1544, respectively;
cxxxii. SEQ ID NO: 760, SEQ ID NO: 917, SEQ ID NO: 1074, SEQ ID NO: 1231, SEQ ID NO: 1388, and SEQ ID NO: 1545, respectively;
cxxxiii. SEQ ID NO: 761, SEQ ID NO: 918, SEQ ID NO: 1075, SEQ ID NO: 1232, SEQ ID NO: 1389, and SEQ ID NO: 1546, respectively;
cxxxiv. SEQ ID NO: 762, SEQ ID NO: 919, SEQ ID NO: 1076, SEQ ID NO: 1233, SEQ ID NO: 1390, and SEQ ID NO: 1547, respectively;
cxxxv. SEQ ID NO: 763, SEQ ID NO: 920, SEQ ID NO: 1077, SEQ ID NO: 1234, SEQ ID NO: 1391, and SEQ ID NO: 1548, respectively;
cxxxvi. SEQ ID NO: 764, SEQ ID NO: 921, SEQ ID NO: 1078, SEQ ID NO: 1235, SEQ ID NO: 1392, and SEQ ID NO: 1549, respectively;
cxxxvii. SEQ ID NO: 765, SEQ ID NO: 922, SEQ ID NO: 1079, SEQ ID NO: 1236, SEQ ID NO: 1393, and SEQ ID NO: 1550, respectively;
cxxxviii. SEQ ID NO: 766, SEQ ID NO: 923, SEQ ID NO: 1080, SEQ ID NO: 1237, SEQ ID NO: 1394, and SEQ ID NO: 1551, respectively;
cxxxix. SEQ ID NO: 767, SEQ ID NO: 924, SEQ ID NO: 1081, SEQ ID NO: 1238, SEQ ID NO: 1395, and SEQ ID NO: 1552, respectively;
cxl. SEQ ID NO: 768, SEQ ID NO: 925, SEQ ID NO: 1082, SEQ ID NO: 1239, SEQ ID NO: 1396, and SEQ ID NO: 1553, respectively;
cxli. SEQ ID NO: 769, SEQ ID NO: 926, SEQ ID NO: 1083, SEQ ID NO: 1240, SEQ ID NO: 1397, and SEQ ID NO: 1554, respectively;
cxlii. SEQ ID NO: 770, SEQ ID NO: 927, SEQ ID NO: 1084, SEQ ID NO: 1241, SEQ ID NO: 1398, and SEQ ID NO: 1555, respectively;
cxliii. SEQ ID NO: 771, SEQ ID NO: 928, SEQ ID NO: 1085, SEQ ID NO: 1242, SEQ ID NO: 1399, and SEQ ID NO: 1556, respectively;
cxliv. SEQ ID NO: 772, SEQ ID NO: 929, SEQ ID NO: 1086, SEQ ID NO: 1243, SEQ ID NO: 1400, and SEQ ID NO: 1557, respectively;
cxlv. SEQ ID NO: 773, SEQ ID NO: 930, SEQ ID NO: 1087, SEQ ID NO: 1244, SEQ ID NO: 1401, and SEQ ID NO: 1558, respectively;
cxlvi. SEQ ID NO: 774, SEQ ID NO: 931, SEQ ID NO: 1088, SEQ ID NO: 1245, SEQ ID NO: 1402, and SEQ ID NO: 1559, respectively;
cxlvii. SEQ ID NO: 775, SEQ ID NO: 932, SEQ ID NO: 1089, SEQ ID NO: 1246, SEQ ID NO: 1403, and SEQ ID NO: 1560, respectively;
cxlviii. SEQ ID NO: 776, SEQ ID NO: 933, SEQ ID NO: 1090, SEQ ID NO: 1247, SEQ ID NO: 1404, and SEQ ID NO: 1561, respectively;
cxlix. SEQ ID NO: 777, SEQ ID NO: 934, SEQ ID NO: 1091, SEQ ID NO: 1248, SEQ ID NO: 1405, and SEQ ID NO: 1562, respectively;
cl. SEQ ID NO: 778, SEQ ID NO: 935, SEQ ID NO: 1092, SEQ ID NO: 1249, SEQ ID NO: 1406, and SEQ ID NO: 1563, respectively;
cli. SEQ ID NO: 779, SEQ ID NO: 936, SEQ ID NO: 1093, SEQ ID NO: 1250, SEQ ID NO: 1407, and SEQ ID NO: 1564, respectively;
clii. SEQ ID NO: 780, SEQ ID NO: 937, SEQ ID NO: 1094, SEQ ID NO: 1251, SEQ ID NO: 1408, and SEQ ID NO: 1565, respectively;
cliii. SEQ ID NO: 781, SEQ ID NO: 938, SEQ ID NO: 1095, SEQ ID NO: 1252, SEQ ID NO: 1409, and SEQ ID NO: 1566, respectively;
cliv. SEQ ID NO: 782, SEQ ID NO: 939, SEQ ID NO: 1096, SEQ ID NO: 1253, SEQ ID NO: 1410, and SEQ ID NO: 1567, respectively;
clv. SEQ ID NO: 783, SEQ ID NO: 940, SEQ ID NO: 1097, SEQ ID NO: 1254, SEQ ID NO: 1411, and SEQ ID NO: 1568, respectively;
clvi. SEQ ID NO: 784, SEQ ID NO: 941, SEQ ID NO: 1098, SEQ ID NO: 1255, SEQ ID NO: 1412, and SEQ ID NO: 1569, respectively; and
clvii. SEQ ID NO: 785, SEQ ID NO: 942, SEQ ID NO: 1099, SEQ ID NO: 1256, SEQ ID NO: 1413, and SEQ ID NO: 1570, respectively.

29. The molecule of any one of claims 1-28, wherein the antibody comprises a light chain variable region and a heavy chain variable region, wherein the light chain variable region and the heavy chain variable region comprise amino acid sequences selected from:
i. SEQ ID NO: 1 and SEQ ID NO: 158, respectively;
ii. SEQ ID NO: 2 and SEQ ID NO: 159, respectively;
iii. SEQ ID NO: 3 and SEQ ID NO: 160, respectively;
iv. SEQ ID NO: 4 and SEQ ID NO: 161, respectively;
v. SEQ ID NO: 5 and SEQ ID NO: 162, respectively;
vi. SEQ ID NO: 6 and SEQ ID NO: 163, respectively;
vii. SEQ ID NO: 7 and SEQ ID NO: 164, respectively;
viii. SEQ ID NO: 8 and SEQ ID NO: 165, respectively;
ix. SEQ ID NO: 9 and SEQ ID NO: 166, respectively;
x. SEQ ID NO: 10 and SEQ ID NO: 167, respectively;
xi. SEQ ID NO: 11 and SEQ ID NO: 168, respectively;
xii. SEQ ID NO: 12 and SEQ ID NO: 169, respectively;
xiii. SEQ ID NO: 13 and SEQ ID NO: 170, respectively;
xiv. SEQ ID NO: 14 and SEQ ID NO: 171, respectively;
xv. SEQ ID NO: 15 and SEQ ID NO: 172, respectively;
xvi. SEQ ID NO: 16 and SEQ ID NO: 173, respectively;
xvii. SEQ ID NO: 17 and SEQ ID NO: 174, respectively;
xviii. SEQ ID NO: 18 and SEQ ID NO: 175, respectively;
xix. SEQ ID NO: 19 and SEQ ID NO: 176, respectively;
xx. SEQ ID NO: 20 and SEQ ID NO: 177, respectively;
xxi. SEQ ID NO: 21 and SEQ ID NO: 178, respectively;
xxii. SEQ ID NO: 22 and SEQ ID NO: 179, respectively;
xxiii. SEQ ID NO: 23 and SEQ ID NO: 180, respectively;
xxiv. SEQ ID NO: 24 and SEQ ID NO: 181, respectively;
xxv. SEQ ID NO: 25 and SEQ ID NO: 182, respectively;
xxvi. SEQ ID NO: 26 and SEQ ID NO: 183, respectively;
xxvii. SEQ ID NO: 27 and SEQ ID NO: 184, respectively;
xxviii. SEQ ID NO: 28 and SEQ ID NO: 185, respectively;
xxix. SEQ ID NO: 29 and SEQ ID NO: 186, respectively;
xxx. SEQ ID NO: 30 and SEQ ID NO: 187, respectively;
xxxi. SEQ ID NO: 31 and SEQ ID NO: 188, respectively;
xxxii. SEQ ID NO: 32 and SEQ ID NO: 189, respectively;
xxxiii. SEQ ID NO: 33 and SEQ ID NO: 190, respectively;
xxxiv. SEQ ID NO: 34 and SEQ ID NO: 191, respectively;
xxxv. SEQ ID NO: 35 and SEQ ID NO: 192, respectively;
xxxvi. SEQ ID NO: 36 and SEQ ID NO: 193, respectively;
xxxvii. SEQ ID NO: 37 and SEQ ID NO: 194, respectively;
xxxviii. SEQ ID NO: 38 and SEQ ID NO: 195, respectively;
xxxix. SEQ ID NO: 39 and SEQ ID NO: 196, respectively;
xl. SEQ ID NO: 40 and SEQ ID NO: 197, respectively;
xli. SEQ ID NO: 41 and SEQ ID NO: 198, respectively;
xlii. SEQ ID NO: 42 and SEQ ID NO: 199, respectively;
xliii. SEQ ID NO: 43 and SEQ ID NO: 200, respectively;
xliv. SEQ ID NO: 44 and SEQ ID NO: 201, respectively;
xlv. SEQ ID NO: 45 and SEQ ID NO: 202, respectively;
xlvi. SEQ ID NO: 46 and SEQ ID NO: 203, respectively;
xlvii. SEQ ID NO: 47 and SEQ ID NO: 204, respectively;
xlviii. SEQ ID NO: 48 and SEQ ID NO: 205, respectively;
xlix. SEQ ID NO: 49 and SEQ ID NO: 206, respectively;
l. SEQ ID NO: 50 and SEQ ID NO: 207, respectively;
li. SEQ ID NO: 51 and SEQ ID NO: 208, respectively;
lii. SEQ ID NO: 52 and SEQ ID NO: 209, respectively;
liii. SEQ ID NO: 53 and SEQ ID NO: 210, respectively;
liv. SEQ ID NO: 54 and SEQ ID NO: 211, respectively;
lv. SEQ ID NO: 55 and SEQ ID NO: 212, respectively;
lvi. SEQ ID NO: 56 and SEQ ID NO: 213, respectively;
lvii. SEQ ID NO: 57 and SEQ ID NO: 214, respectively;
lviii. SEQ ID NO: 58 and SEQ ID NO: 215, respectively;
lix. SEQ ID NO: 59 and SEQ ID NO: 216, respectively;
lx. SEQ ID NO: 60 and SEQ ID NO: 217, respectively;
lxi. SEQ ID NO: 61 and SEQ ID NO: 218, respectively;
lxii. SEQ ID NO: 62 and SEQ ID NO: 219, respectively;
lxiii. SEQ ID NO: 63 and SEQ ID NO: 220, respectively;
lxiv. SEQ ID NO: 64 and SEQ ID NO: 221, respectively;
lxv. SEQ ID NO: 65 and SEQ ID NO: 222, respectively;
lxvi. SEQ ID NO: 66 and SEQ ID NO: 223, respectively;
lxvii. SEQ ID NO: 67 and SEQ ID NO: 224, respectively;
lxviii. SEQ ID NO: 68 and SEQ ID NO: 225, respectively;
lxix. SEQ ID NO: 69 and SEQ ID NO: 226, respectively;
lxx. SEQ ID NO: 70 and SEQ ID NO: 227, respectively;
lxxi. SEQ ID NO: 71 and SEQ ID NO: 228, respectively;
lxxii. SEQ ID NO: 72 and SEQ ID NO: 229, respectively;
lxxiii. SEQ ID NO: 73 and SEQ ID NO: 230, respectively;
lxxiv. SEQ ID NO: 74 and SEQ ID NO: 231, respectively;
lxxv. SEQ ID NO: 75 and SEQ ID NO: 232, respectively;
lxxvi. SEQ ID NO: 76 and SEQ ID NO: 233, respectively;
lxxvii. SEQ ID NO: 77 and SEQ ID NO: 234, respectively;
lxxviii. SEQ ID NO: 78 and SEQ ID NO: 235, respectively;
lxxix. SEQ ID NO: 79 and SEQ ID NO: 236, respectively;
lxxx. SEQ ID NO: 80 and SEQ ID NO: 237, respectively;
lxxxi. SEQ ID NO: 81 and SEQ ID NO: 238, respectively;
lxxxii. SEQ ID NO: 82 and SEQ ID NO: 239, respectively;
lxxxiii. SEQ ID NO: 83 and SEQ ID NO: 240, respectively;
lxxxiv. SEQ ID NO: 84 and SEQ ID NO: 241, respectively;
lxxxv. SEQ ID NO: 85 and SEQ ID NO: 242, respectively;
lxxxvi. SEQ ID NO: 86 and SEQ ID NO: 243, respectively;
lxxxvii. SEQ ID NO: 87 and SEQ ID NO: 244, respectively;
lxxxviii. SEQ ID NO: 88 and SEQ ID NO: 245, respectively;
lxxxix. SEQ ID NO: 89 and SEQ ID NO: 246, respectively;
xc. SEQ ID NO: 90 and SEQ ID NO: 247, respectively;
xci. SEQ ID NO: 91 and SEQ ID NO: 248, respectively;
xcii. SEQ ID NO: 92 and SEQ ID NO: 249, respectively;
xciii. SEQ ID NO: 93 and SEQ ID NO: 250, respectively;
xciv. SEQ ID NO: 94 and SEQ ID NO: 251, respectively;
xcv. SEQ ID NO: 95 and SEQ ID NO: 252, respectively;
xcvi. SEQ ID NO: 96 and SEQ ID NO: 253, respectively;
xcvii. SEQ ID NO: 97 and SEQ ID NO: 254, respectively;
xcviii. SEQ ID NO: 98 and SEQ ID NO: 255, respectively;
xcix. SEQ ID NO: 99 and SEQ ID NO: 256, respectively;
c. SEQ ID NO: 100 and SEQ ID NO: 257, respectively;
ci. SEQ ID NO: 101 and SEQ ID NO: 258, respectively;
cii. SEQ ID NO: 102 and SEQ ID NO: 259, respectively;
ciii. SEQ ID NO: 103 and SEQ ID NO: 260, respectively;
civ. SEQ ID NO: 104 and SEQ ID NO: 261, respectively;
cv. SEQ ID NO: 105 and SEQ ID NO: 262, respectively;
cvi. SEQ ID NO: 106 and SEQ ID NO: 263, respectively;
cvii. SEQ ID NO: 107 and SEQ ID NO: 264, respectively;
cviii. SEQ ID NO: 108 and SEQ ID NO: 265, respectively;
cix. SEQ ID NO: 109 and SEQ ID NO: 266, respectively;
cx. SEQ ID NO: 110 and SEQ ID NO: 267, respectively;
cxi. SEQ ID NO: 111 and SEQ ID NO: 268, respectively;
cxii. SEQ ID NO: 112 and SEQ ID NO: 269, respectively;
cxiii. SEQ ID NO: 113 and SEQ ID NO: 270, respectively;
cxiv. SEQ ID NO: 114 and SEQ ID NO: 271, respectively;
cxv. SEQ ID NO: 115 and SEQ ID NO: 272, respectively;
cxvi. SEQ ID NO: 116 and SEQ ID NO: 273, respectively;
cxvii. SEQ ID NO: 117 and SEQ ID NO: 274, respectively;
cxviii. SEQ ID NO: 118 and SEQ ID NO: 275, respectively;
cxix. SEQ ID NO: 119 and SEQ ID NO: 276, respectively;
cxx. SEQ ID NO: 120 and SEQ ID NO: 277, respectively;
cxxi. SEQ ID NO: 121 and SEQ ID NO: 278, respectively;
cxxii. SEQ ID NO: 122 and SEQ ID NO: 279, respectively;
cxxiii. SEQ ID NO: 123 and SEQ ID NO: 280, respectively;
cxxiv. SEQ ID NO: 124 and SEQ ID NO: 281, respectively;
cxxv. SEQ ID NO: 125 and SEQ ID NO: 282, respectively;
cxxvi. SEQ ID NO: 126 and SEQ ID NO: 283, respectively;
cxxvii. SEQ ID NO: 127 and SEQ ID NO: 284, respectively;
cxxviii. SEQ ID NO: 128 and SEQ ID NO: 285, respectively;
cxxix. SEQ ID NO: 129 and SEQ ID NO: 286, respectively;
cxxx. SEQ ID NO: 130 and SEQ ID NO: 287, respectively;
cxxxi. SEQ ID NO: 131 and SEQ ID NO: 288, respectively;
cxxxii. SEQ ID NO: 132 and SEQ ID NO: 289, respectively;
cxxxiii. SEQ ID NO: 133 and SEQ ID NO: 290, respectively;
cxxxiv. SEQ ID NO: 134 and SEQ ID NO: 291, respectively;
cxxxv. SEQ ID NO: 135 and SEQ ID NO: 292, respectively;
cxxxvi. SEQ ID NO: 136 and SEQ ID NO: 293, respectively;
cxxxvii. SEQ ID NO: 137 and SEQ ID NO: 294, respectively;
cxxxviii. SEQ ID NO: 138 and SEQ ID NO: 295, respectively;
cxxxix. SEQ ID NO: 139 and SEQ ID NO: 296, respectively;
cxl. SEQ ID NO: 140 and SEQ ID NO: 297, respectively;
cxli. SEQ ID NO: 141 and SEQ ID NO: 298, respectively;
cxlii. SEQ ID NO: 142 and SEQ ID NO: 299, respectively;
cxliii. SEQ ID NO: 143 and SEQ ID NO: 300, respectively;
cxliv. SEQ ID NO: 144 and SEQ ID NO: 301, respectively;
cxlv. SEQ ID NO: 145 and SEQ ID NO: 302, respectively;
cxlvi. SEQ ID NO: 146 and SEQ ID NO: 303, respectively;
cxlvii. SEQ ID NO: 147 and SEQ ID NO: 304, respectively;
cxlviii. SEQ ID NO: 148 and SEQ ID NO: 305, respectively;
cxlix. SEQ ID NO: 149 and SEQ ID NO: 306, respectively;
cl. SEQ ID NO: 150 and SEQ ID NO: 307, respectively;
cli. SEQ ID NO: 151 and SEQ ID NO: 308, respectively;
clii. SEQ ID NO: 152 and SEQ ID NO: 309, respectively;
cliii. SEQ ID NO: 153 and SEQ ID NO: 310, respectively;
cliv. SEQ ID NO: 154 and SEQ ID NO: 311, respectively;
clv. SEQ ID NO: 155 and SEQ ID NO: 312, respectively;
clvi. SEQ ID NO: 156 and SEQ ID NO: 313, respectively; and
clvii. SEQ ID NO: 157 and SEQ ID NO: 314, respectively.

30. The molecule of any one of claims 1-29, wherein the antibody comprises a light chain and a heavy chain, wherein the light chain and heavy chain comprise amino acid sequences selected from:
i. SEQ ID NO: 315 and SEQ ID NO: 472, respectively;
ii. SEQ ID NO: 316 and SEQ ID NO: 473, respectively;
iii. SEQ ID NO: 317 and SEQ ID NO: 474, respectively;
iv. SEQ ID NO: 318 and SEQ ID NO: 475, respectively;
v. SEQ ID NO: 319 and SEQ ID NO: 476, respectively;
vi. SEQ ID NO: 320 and SEQ ID NO: 477, respectively;
vii. SEQ ID NO: 321 and SEQ ID NO: 478, respectively;
viii. SEQ ID NO: 322 and SEQ ID NO: 479, respectively;
ix. SEQ ID NO: 323 and SEQ ID NO: 480, respectively;
x. SEQ ID NO: 324 and SEQ ID NO: 481, respectively;
xi. SEQ ID NO: 325 and SEQ ID NO: 482, respectively;
xii. SEQ ID NO: 326 and SEQ ID NO: 483, respectively;
xiii. SEQ ID NO: 327 and SEQ ID NO: 484, respectively;
xiv. SEQ ID NO: 328 and SEQ ID NO: 485, respectively;
xv. SEQ ID NO: 329 and SEQ ID NO: 486, respectively;
xvi. SEQ ID NO: 330 and SEQ ID NO: 487, respectively;
xvii. SEQ ID NO: 331 and SEQ ID NO: 488, respectively;
xviii. SEQ ID NO: 332 and SEQ ID NO: 489, respectively;
xix. SEQ ID NO: 333 and SEQ ID NO: 490, respectively;
xx. SEQ ID NO: 334 and SEQ ID NO: 491, respectively;
xxi. SEQ ID NO: 335 and SEQ ID NO: 492, respectively;
xxii. SEQ ID NO: 336 and SEQ ID NO: 493, respectively;
xxiii. SEQ ID NO: 337 and SEQ ID NO: 494, respectively;
xxiv. SEQ ID NO: 338 and SEQ ID NO: 495, respectively;
xxv. SEQ ID NO: 339 and SEQ ID NO: 496, respectively;
xxvi. SEQ ID NO: 340 and SEQ ID NO: 497, respectively;
xxvii. SEQ ID NO: 341 and SEQ ID NO: 498, respectively;
xxviii. SEQ ID NO: 342 and SEQ ID NO: 499, respectively;
xxix. SEQ ID NO: 343 and SEQ ID NO: 500, respectively;
xxx. SEQ ID NO: 344 and SEQ ID NO: 501, respectively;
xxxi. SEQ ID NO: 345 and SEQ ID NO: 502, respectively;
xxxii. SEQ ID NO: 346 and SEQ ID NO: 503, respectively;
xxxiii. SEQ ID NO: 347 and SEQ ID NO: 504, respectively;
xxxiv. SEQ ID NO: 348 and SEQ ID NO: 505, respectively;
xxxv. SEQ ID NO: 349 and SEQ ID NO: 506, respectively;
xxxvi. SEQ ID NO: 350 and SEQ ID NO: 507, respectively;
xxxvii. SEQ ID NO: 351 and SEQ ID NO: 508, respectively;
xxxviii. SEQ ID NO: 352 and SEQ ID NO: 509, respectively;
xxxix. SEQ ID NO: 353 and SEQ ID NO: 510, respectively;
xl. SEQ ID NO: 354 and SEQ ID NO: 511, respectively;
xli. SEQ ID NO: 355 and SEQ ID NO: 512, respectively;
xlii. SEQ ID NO: 356 and SEQ ID NO: 513, respectively;
xliii. SEQ ID NO: 357 and SEQ ID NO: 514, respectively;
xliv. SEQ ID NO: 358 and SEQ ID NO: 515, respectively;
xlv. SEQ ID NO: 359 and SEQ ID NO: 516, respectively;
xlvi. SEQ ID NO: 360 and SEQ ID NO: 517, respectively;
xlvii. SEQ ID NO: 361 and SEQ ID NO: 518, respectively;
xlviii. SEQ ID NO: 362 and SEQ ID NO: 519, respectively;
xlix. SEQ ID NO: 363 and SEQ ID NO: 520, respectively;
l. SEQ ID NO: 364 and SEQ ID NO: 521, respectively;
li. SEQ ID NO: 365 and SEQ ID NO: 522, respectively;
lii. SEQ ID NO: 366 and SEQ ID NO: 523, respectively;
liii. SEQ ID NO: 367 and SEQ ID NO: 524, respectively;
liv. SEQ ID NO: 368 and SEQ ID NO: 525, respectively;
lv. SEQ ID NO: 369 and SEQ ID NO: 526, respectively;
lvi. SEQ ID NO: 370 and SEQ ID NO: 527, respectively;
lvii. SEQ ID NO: 371 and SEQ ID NO: 528, respectively;
lviii. SEQ ID NO: 372 and SEQ ID NO: 529, respectively;
lix. SEQ ID NO: 373 and SEQ ID NO: 530, respectively;
lx. SEQ ID NO: 374 and SEQ ID NO: 531, respectively;
lxi. SEQ ID NO: 375 and SEQ ID NO: 532, respectively;
lxii. SEQ ID NO: 376 and SEQ ID NO: 533, respectively;
lxiii. SEQ ID NO: 377 and SEQ ID NO: 534, respectively;
lxiv. SEQ ID NO: 378 and SEQ ID NO: 535, respectively;
lxv. SEQ ID NO: 379 and SEQ ID NO: 536, respectively;
lxvi. SEQ ID NO: 380 and SEQ ID NO: 537, respectively;
lxvii. SEQ ID NO: 381 and SEQ ID NO: 538, respectively;
lxviii. SEQ ID NO: 382 and SEQ ID NO: 539, respectively;
lxix. SEQ ID NO: 383 and SEQ ID NO: 540, respectively;
lxx. SEQ ID NO: 384 and SEQ ID NO: 541, respectively;
lxxi. SEQ ID NO: 385 and SEQ ID NO: 542, respectively;
lxxii. SEQ ID NO: 386 and SEQ ID NO: 543, respectively;
lxxiii. SEQ ID NO: 387 and SEQ ID NO: 544, respectively;
lxxiv. SEQ ID NO: 388 and SEQ ID NO: 545, respectively;
lxxv. SEQ ID NO: 389 and SEQ ID NO: 546, respectively;
lxxvi. SEQ ID NO: 390 and SEQ ID NO: 547, respectively;
lxxvii. SEQ ID NO: 391 and SEQ ID NO: 548, respectively;
lxxviii. SEQ ID NO: 392 and SEQ ID NO: 549, respectively;
lxxix. SEQ ID NO: 393 and SEQ ID NO: 550, respectively;
lxxx. SEQ ID NO: 394 and SEQ ID NO: 551, respectively;
lxxxi. SEQ ID NO: 395 and SEQ ID NO: 552, respectively;
lxxxii. SEQ ID NO: 396 and SEQ ID NO: 553, respectively;
lxxxiii. SEQ ID NO: 397 and SEQ ID NO: 554, respectively;
lxxxiv. SEQ ID NO: 398 and SEQ ID NO: 555, respectively;
lxxxv. SEQ ID NO: 399 and SEQ ID NO: 556, respectively;
lxxxvi. SEQ ID NO: 400 and SEQ ID NO: 557, respectively;
lxxxvii. SEQ ID NO: 401 and SEQ ID NO: 558, respectively;
lxxxviii. SEQ ID NO: 402 and SEQ ID NO: 559, respectively;
lxxxix. SEQ ID NO: 403 and SEQ ID NO: 560, respectively;
xc. SEQ ID NO: 404 and SEQ ID NO: 561, respectively;
xci. SEQ ID NO: 405 and SEQ ID NO: 562, respectively;
xcii. SEQ ID NO: 406 and SEQ ID NO: 563, respectively;
xciii. SEQ ID NO: 407 and SEQ ID NO: 564, respectively;
xciv. SEQ ID NO: 408 and SEQ ID NO: 565, respectively;
xcv. SEQ ID NO: 409 and SEQ ID NO: 566, respectively;
xcvi. SEQ ID NO: 410 and SEQ ID NO: 567, respectively;
xcvii. SEQ ID NO: 411 and SEQ ID NO: 568, respectively;
xcviii. SEQ ID NO: 412 and SEQ ID NO: 569, respectively;
xcix. SEQ ID NO: 413 and SEQ ID NO: 570, respectively;
c. SEQ ID NO: 414 and SEQ ID NO: 571, respectively;
ci. SEQ ID NO: 415 and SEQ ID NO: 572, respectively;
cii. SEQ ID NO: 416 and SEQ ID NO: 573, respectively;
ciii. SEQ ID NO: 417 and SEQ ID NO: 574, respectively;
civ. SEQ ID NO: 418 and SEQ ID NO: 575, respectively;
cv. SEQ ID NO: 419 and SEQ ID NO: 576, respectively;
cvi. SEQ ID NO: 420 and SEQ ID NO: 577, respectively;
cvii. SEQ ID NO: 421 and SEQ ID NO: 578, respectively;
cviii. SEQ ID NO: 422 and SEQ ID NO: 579, respectively;
cix. SEQ ID NO: 423 and SEQ ID NO: 580, respectively;
cx. SEQ ID NO: 424 and SEQ ID NO: 581, respectively;
cxi. SEQ ID NO: 425 and SEQ ID NO: 582, respectively;
cxii. SEQ ID NO: 426 and SEQ ID NO: 583, respectively;
cxiii. SEQ ID NO: 427 and SEQ ID NO: 584, respectively;
cxiv. SEQ ID NO: 428 and SEQ ID NO: 585, respectively;
cxv. SEQ ID NO: 429 and SEQ ID NO: 586, respectively;
cxvi. SEQ ID NO: 430 and SEQ ID NO: 587, respectively;
cxvii. SEQ ID NO: 431 and SEQ ID NO: 588, respectively;
cxviii. SEQ ID NO: 432 and SEQ ID NO: 589, respectively;
cxix. SEQ ID NO: 433 and SEQ ID NO: 590, respectively;
cxx. SEQ ID NO: 434 and SEQ ID NO: 591, respectively;
cxxi. SEQ ID NO: 435 and SEQ ID NO: 592, respectively;
cxxii. SEQ ID NO: 436 and SEQ ID NO: 593, respectively;
cxxiii. SEQ ID NO: 437 and SEQ ID NO: 594, respectively;
cxxiv. SEQ ID NO: 438 and SEQ ID NO: 595, respectively;
cxxv. SEQ ID NO: 439 and SEQ ID NO: 596, respectively;
cxxvi. SEQ ID NO: 440 and SEQ ID NO: 597, respectively;
cxxvii. SEQ ID NO: 441 and SEQ ID NO: 598, respectively;
cxxviii. SEQ ID NO: 442 and SEQ ID NO: 599, respectively;
cxxix. SEQ ID NO: 443 and SEQ ID NO: 600, respectively;
cxxx. SEQ ID NO: 444 and SEQ ID NO: 601, respectively;
cxxxi. SEQ ID NO: 445 and SEQ ID NO: 602, respectively;
cxxxii. SEQ ID NO: 446 and SEQ ID NO: 603, respectively;
cxxxiii. SEQ ID NO: 447 and SEQ ID NO: 604, respectively;
cxxxiv. SEQ ID NO: 448 and SEQ ID NO: 605, respectively;
cxxxv. SEQ ID NO: 449 and SEQ ID NO: 606, respectively;
cxxxvi. SEQ ID NO: 450 and SEQ ID NO: 607, respectively;
cxxxvii. SEQ ID NO: 451 and SEQ ID NO: 608, respectively;
cxxxviii. SEQ ID NO: 452 and SEQ ID NO: 609, respectively;
cxxxix. SEQ ID NO: 453 and SEQ ID NO: 610, respectively;
cxl. SEQ ID NO: 454 and SEQ ID NO: 611, respectively;
cxli. SEQ ID NO: 455 and SEQ ID NO: 612, respectively;
cxlii. SEQ ID NO: 456 and SEQ ID NO: 613, respectively;
cxliii. SEQ ID NO: 457 and SEQ ID NO: 614, respectively;
cxliv. SEQ ID NO: 458 and SEQ ID NO: 615, respectively;
cxlv. SEQ ID NO: 459 and SEQ ID NO: 616, respectively;
cxlvi. SEQ ID NO: 460 and SEQ ID NO: 617, respectively;
cxlvii. SEQ ID NO: 461 and SEQ ID NO: 618, respectively;
cxlviii. SEQ ID NO: 462 and SEQ ID NO: 619, respectively;
cxlix. SEQ ID NO: 463 and SEQ ID NO: 620, respectively;
cl. SEQ ID NO: 464 and SEQ ID NO: 621, respectively;
cli. SEQ ID NO: 465 and SEQ ID NO: 622, respectively;
clii. SEQ ID NO: 466 and SEQ ID NO: 623, respectively;
cliii. SEQ ID NO: 467 and SEQ ID NO: 624, respectively;
cliv. SEQ ID NO: 468 and SEQ ID NO: 625, respectively;
clv. SEQ ID NO: 469 and SEQ ID NO: 626, respectively;
clvi. SEQ ID NO: 470 and SEQ ID NO: 627, respectively; and
clvii. SEQ ID NO: 471 and SEQ ID NO: 628, respectively,
wherein the antibody comprises one or more cysteine amino acid substitution(s) at one or more position(s) selected from 88 of the light chain, 384 of the heavy chain, or 487 of the heavy chain, according to AHo numbering.

31. A molecule comprising:
a first polypeptide and a second polypeptide that agonize a glucagon receptor (“GCGR”), wherein each of the first polypeptide and the second polypeptide comprise an amino acid sequence independently selected from SEQ ID NOs: 1587-1627, 1747-1749, 1751-1792, 1794-1798, 1801-1830, 1833-1840, and 1859-1862;
a first linker polypeptide and a second linker polypeptide, wherein each of the first linker polypeptide and the second linker polypeptide comprise an amino acid sequence selected from SEQ ID NOs: 1628-1683, 1739-1746, and 1841-1852; and
an antibody that specifically binds to a glucose-dependent insulinotropic polypeptide receptor (“GIPR”), wherein the antibody comprises a first light chain and a second light chain, wherein the first light chain and the second light chain each comprise the amino acid sequence of SEQ ID NO: 388, and a first heavy chain and a second heavy chain, wherein the first heavy chain and the second heavy chain each comprise the amino acid sequence of SEQ ID NO: 1571,
wherein:
an ε-amino group of a lysine residue at position 21, position 24, position 28, or position 31 of the first polypeptide is covalently linked to a C-terminus of the first linker polypeptide;
an N-terminus of the first linker polypeptide is conjugated to a cysteine residue at position 275 of the first heavy chain of the antibody;
an ε-amino group of a lysine residue at position 21, position 24, position 28, or position 31 of the second polypeptide is covalently linked to a C-terminus of the second linker polypeptide; and
an N-terminus of the second linker polypeptide is conjugated to a cysteine residue at position 275 of the second heavy chain of the antibody.

32. A molecule comprising:
a first polypeptide and a second polypeptide that agonize a glucagon receptor (“GCGR”), wherein each of the first polypeptide and the second polypeptide comprise an amino acid sequence independently selected from SEQ ID NOs: 1587-1627, 1747-1840, and 1859-1862;
a first linker polypeptide and a second linker polypeptide, wherein each of the first linker polypeptide and the second linker polypeptide comprise an amino acid sequence selected from SEQ ID NOs: 1628-1683, 1739-1746, and 1841-1852; and
an antibody that specifically binds to a glucose-dependent insulinotropic polypeptide receptor (“GIPR”), wherein the antibody comprises a first light chain and a second light chain, wherein the first light chain and the second light chain each comprise the amino acid sequence of SEQ ID NO: 388, and a first heavy chain and a second heavy chain, wherein the first heavy chain and the second heavy chain each comprise the amino acid sequence of SEQ ID NO: 1571,
wherein:
a C-terminal amino acid residue of the first polypeptide is covalently linked to an N-terminal amino acid residue of the first linker polypeptide;
a C-terminal amino acid residue of the first linker polypeptide is conjugated to a cysteine residue at position 275 of the first heavy chain of the antibody;
a C-terminal amino acid residue of the second polypeptide is covalently linked to an N-terminal amino acid residue of the second linker polypeptide; and
a C-terminal amino acid residue of the second linker polypeptide is conjugated to a cysteine residue at position 275 of the second heavy chain of the antibody.

33. A molecule comprising:
a first polypeptide and a second polypeptide that agonize a glucagon receptor (“GCGR”), wherein the first polypeptide and the second polypeptide each comprise the amino acid sequence of SEQ ID NO: 1615;
a first linker polypeptide and a second linker polypeptide, wherein the first linker polypeptide and the second linker polypeptide each comprise the amino acid sequence of SEQ ID NO: 1629; and
an antibody that specifically binds to a glucose-dependent insulinotropic polypeptide receptor (“GIPR”), wherein the antibody comprises a first light chain and a second light chain, wherein the first light chain and the second light chain each comprise the amino acid sequence of SEQ ID NO: 388, and a first heavy chain and a second heavy chain, wherein the first heavy chain and the second heavy chain each comprise the amino acid sequence of SEQ ID NO: 1571,
wherein:
an ε-amino group of a lysine residue at position 28 of the first polypeptide is covalently linked to a C-terminus of the first linker polypeptide;
an N-terminus of the first linker polypeptide is conjugated to a cysteine residue at position 275 of the first heavy chain of the antibody;
an ε-amino group of a lysine residue at position 28 of the second polypeptide is covalently linked to a C-terminus of the second linker polypeptide; and
an N-terminus of the second linker polypeptide is conjugated to a cysteine residue at position 275 of the second heavy chain of the antibody.

34. A molecule comprising:
a first polypeptide and a second polypeptide that agonize a glucagon receptor (“GCGR”), wherein the first polypeptide and the second polypeptide each comprise the amino acid sequence of SEQ ID NO: 1626;
a first linker polypeptide and a second linker polypeptide, wherein the first linker polypeptide and the second linker polypeptide each comprise the amino acid sequence of SEQ ID NO: 1628; and
an antibody that specifically binds to a glucose-dependent insulinotropic polypeptide receptor (“GIPR”), wherein the antibody comprises a first light chain and a second light chain, wherein the first light chain and the second light chain each comprise the amino acid sequence of SEQ ID NO: 388, and a first heavy chain and a second heavy chain, wherein the first heavy chain and the second heavy chain each comprise the amino acid sequence of SEQ ID NO: 1571,
wherein:
an ε-amino group of a lysine residue at position 28 of the first polypeptide is covalently linked to a C-terminus of the first linker polypeptide;
an N-terminus of the first linker polypeptide is conjugated to a cysteine residue at position 275 of the first heavy chain of the antibody;
an ε-amino group of a lysine residue at position 28 of the second polypeptide is covalently linked to a C-terminus of the second linker polypeptide; and
an N-terminus of the second linker polypeptide is conjugated to a cysteine residue at position 275 of the second heavy chain of the antibody.

35. A molecule comprising:
a first polypeptide and a second polypeptide that agonize a glucagon receptor (“GCGR”), wherein the first polypeptide and the second polypeptide each comprise the amino acid sequence of SEQ ID NO: 1592;
a first linker polypeptide and a second linker polypeptide, wherein the first linker polypeptide and the second linker polypeptide each comprise the amino acid sequence of SEQ ID NO: 1628; and
an antibody that specifically binds to a glucose-dependent insulinotropic polypeptide receptor (“GIPR”), wherein the antibody comprises a first light chain and a second light chain, wherein the first light chain and the second light chain each comprise the amino acid sequence of SEQ ID NO: 388, and a first heavy chain and a second heavy chain, wherein the first heavy chain and the second heavy chain each comprise the amino acid sequence of SEQ ID NO: 1571,
wherein:
an ε-amino group of a lysine residue at position 24 of the first polypeptide is covalently linked to a C-terminus of the first linker polypeptide;
an N-terminus of the first linker polypeptide is conjugated to a cysteine residue at position 275 of the first heavy chain of the antibody;
an ε-amino group of a lysine residue at position 24 of the second polypeptide is covalently linked to a C-terminus of the second linker polypeptide; and
an N-terminus of the second linker polypeptide is conjugated to a cysteine residue at position 275 of the second heavy chain of the antibody.

36. A molecule comprising:
a first polypeptide and a second polypeptide that agonize a glucagon receptor (“GCGR”), wherein the first polypeptide and the second polypeptide each comprise the amino acid sequence of SEQ ID NO: 1626;
a first linker polypeptide and a second linker polypeptide, wherein the first linker polypeptide and the second linker polypeptide each comprise the amino acid sequence of SEQ ID NO: 1629; and
an antibody that specifically binds to a glucose-dependent insulinotropic polypeptide receptor (“GIPR”), wherein the antibody comprises a first light chain and a second light chain, wherein the first light chain and the second light chain each comprise the amino acid sequence of SEQ ID NO: 388, and a first heavy chain and a second heavy chain, wherein the first heavy chain and the second heavy chain each comprise the amino acid sequence of SEQ ID NO: 1571,
wherein:
an ε-amino group of a lysine residue at position 28 of the first polypeptide is covalently linked to a C-terminus of the first linker polypeptide;
an N-terminus of the first linker polypeptide is conjugated to a cysteine residue at position 275 of the first heavy chain of the antibody;
an ε-amino group of a lysine residue at position 28 of the second polypeptide is covalently linked to a C-terminus of the second linker polypeptide; and
an N-terminus of the second linker polypeptide is conjugated to a cysteine residue at position 275 of the second heavy chain of the antibody.

37. A molecule comprising:
a first polypeptide and a second polypeptide that agonize a glucagon receptor (“GCGR”), wherein the first polypeptide and the second polypeptide each comprise the amino acid sequence of SEQ ID NO: 1587;
a first linker polypeptide and a second linker polypeptide, wherein the first linker polypeptide and the second linker polypeptide each comprise the amino acid sequence of SEQ ID NO: 1628; and
an antibody that specifically binds to a glucose-dependent insulinotropic polypeptide receptor (“GIPR”), wherein the antibody comprises a first light chain and a second light chain, wherein the first light chain and the second light chain each comprise the amino acid sequence of SEQ ID NO: 388, and a first heavy chain and a second heavy chain, wherein the first heavy chain and the second heavy chain each comprise the amino acid sequence of SEQ ID NO: 1571,
wherein:
an ε-amino group of a lysine residue at position 28 of the first polypeptide is covalently linked to a C-terminus of the first linker polypeptide;
an N-terminus of the first linker polypeptide is conjugated to a cysteine residue at position 275 of the first heavy chain of the antibody;
an ε-amino group of a lysine residue at position 28 of the second polypeptide is covalently linked to a C-terminus of the second linker polypeptide; and
an N-terminus of the second linker polypeptide is conjugated to a cysteine residue at position 275 of the second heavy chain of the antibody.

38. A molecule comprising:
a first polypeptide and a second polypeptide that agonize a glucagon receptor (“GCGR”), wherein the first polypeptide and the second polypeptide each comprise the amino acid sequence of SEQ ID NO: 1587;
a first linker polypeptide and a second linker polypeptide, wherein the first linker polypeptide and the second linker polypeptide each comprise the amino acid sequence of SEQ ID NO: 1630; and
an antibody that specifically binds to a glucose-dependent insulinotropic polypeptide receptor (“GIPR”), wherein the antibody comprises a first light chain and a second light chain, wherein the first light chain and the second light chain each comprise the amino acid sequence of SEQ ID NO: 388, and a first heavy chain and a second heavy chain, wherein the first heavy chain and the second heavy chain each comprise the amino acid sequence of SEQ ID NO: 1571,
wherein:
an ε-amino group of a lysine residue at position 28 of the first polypeptide is covalently linked to a C-terminus of the first linker polypeptide;
an N-terminus of the first linker polypeptide is conjugated to a cysteine residue at position 275 of the first heavy chain of the antibody;
an ε-amino group of a lysine residue at position 28 of the second polypeptide is covalently linked to a C-terminus of the second linker polypeptide; and
an N-terminus of the second linker polypeptide is conjugated to a cysteine residue at position 275 of the second heavy chain of the antibody.

39. A molecule comprising:
a first polypeptide and a second polypeptide that agonize a glucagon receptor (“GCGR”), wherein the first polypeptide and the second polypeptide each comprise the amino acid sequence of SEQ ID NO: 1822;
a first linker polypeptide and a second linker polypeptide, wherein the first linker polypeptide and the second linker polypeptide each comprise the amino acid sequence of SEQ ID NO: 1628; and
an antibody that specifically binds to a glucose-dependent insulinotropic polypeptide receptor (“GIPR”), wherein the antibody comprises a first light chain and a second light chain, wherein the first light chain and the second light chain each comprise the amino acid sequence of SEQ ID NO: 388, and a first heavy chain and a second heavy chain, wherein the first heavy chain and the second heavy chain each comprise the amino acid sequence of SEQ ID NO: 1571,
wherein:
an ε-amino group of a lysine residue at position 24 of the first polypeptide is covalently linked to a C-terminus of the first linker polypeptide;
an N-terminus of the first linker polypeptide is conjugated to a cysteine residue at position 275 of the first heavy chain of the antibody;
an ε-amino group of a lysine residue at position 24 of the second polypeptide is covalently linked to a C-terminus of the second linker polypeptide; and
an N-terminus of the second linker polypeptide is conjugated to a cysteine residue at position 275 of the second heavy chain of the antibody.

40. A molecule comprising:
a first polypeptide and a second polypeptide that agonize a glucagon receptor (“GCGR”), wherein the first polypeptide and the second polypeptide each comprise the amino acid sequence of SEQ ID NO: 1825;
a first linker polypeptide and a second linker polypeptide, wherein the first linker polypeptide and the second linker polypeptide each comprise the amino acid sequence of SEQ ID NO: 1628; and
an antibody that specifically binds to a glucose-dependent insulinotropic polypeptide receptor (“GIPR”), wherein the antibody comprises a first light chain and a second light chain, wherein the first light chain and the second light chain each comprise the amino acid sequence of SEQ ID NO: 388, and a first heavy chain and a second heavy chain, wherein the first heavy chain and the second heavy chain each comprise the amino acid sequence of SEQ ID NO: 1571,
wherein:
an ε-amino group of a lysine residue at position 28 of the first polypeptide is covalently linked to a C-terminus of the first linker polypeptide;
an N-terminus of the first linker polypeptide is conjugated to a cysteine residue at position 275 of the first heavy chain of the antibody;
an ε-amino group of a lysine residue at position 28 of the second polypeptide is covalently linked to a C-terminus of the second linker polypeptide; and
an N-terminus of the second linker polypeptide is conjugated to a cysteine residue at position 275 of the second heavy chain of the antibody.

41. A molecule comprising:
a first polypeptide and a second polypeptide that agonize a glucagon receptor (“GCGR”), wherein the first polypeptide and the second polypeptide each comprise the amino acid sequence of SEQ ID NO: 1826;
a first linker polypeptide and a second linker polypeptide, wherein the first linker polypeptide and the second linker polypeptide each comprise the amino acid sequence of SEQ ID NO: 1628; and
an antibody that specifically binds to a glucose-dependent insulinotropic polypeptide receptor (“GIPR”), wherein the antibody comprises a first light chain and a second light chain, wherein the first light chain and the second light chain each comprise the amino acid sequence of SEQ ID NO: 388, and a first heavy chain and a second heavy chain, wherein the first heavy chain and the second heavy chain each comprise the amino acid sequence of SEQ ID NO: 1571,
wherein:
an ε-amino group of a lysine residue at position 28 of the first polypeptide is covalently linked to a C-terminus of the first linker polypeptide;
an N-terminus of the first linker polypeptide is conjugated to a cysteine residue at position 275 of the first heavy chain of the antibody;
an ε-amino group of a lysine residue at position 28 of the second polypeptide is covalently linked to a C-terminus of the second linker polypeptide; and
an N-terminus of the second linker polypeptide is conjugated to a cysteine residue at position 275 of the second heavy chain of the antibody.

42. A molecule comprising:
a first polypeptide and a second polypeptide that agonize a glucagon receptor (“GCGR”), wherein the first polypeptide and the second polypeptide each comprise the amino acid sequence of SEQ ID NO: 1818;
a first linker polypeptide and a second linker polypeptide, wherein the first linker polypeptide and the second linker polypeptide each comprise the amino acid sequence of SEQ ID NO: 1628; and
an antibody that specifically binds to a glucose-dependent insulinotropic polypeptide receptor (“GIPR”), wherein the antibody comprises a first light chain and a second light chain, wherein the first light chain and the second light chain each comprise the amino acid sequence of SEQ ID NO: 388, and a first heavy chain and a second heavy chain, wherein the first heavy chain and the second heavy chain each comprise the amino acid sequence of SEQ ID NO: 1571,
wherein:
an ε-amino group of a lysine residue at position 28 of the first polypeptide is covalently linked to a C-terminus of the first linker polypeptide;
an N-terminus of the first linker polypeptide is conjugated to a cysteine residue at position 275 of the first heavy chain of the antibody;
an ε-amino group of a lysine residue at position 28 of the second polypeptide is covalently linked to a C-terminus of the second linker polypeptide; and
an N-terminus of the second linker polypeptide is conjugated to a cysteine residue at position 275 of the second heavy chain of the antibody.

43. A molecule comprising:
a polypeptide that agonizes a glucagon receptor (“GCGR”), wherein the polypeptide comprises the amino acid sequence of any one of SEQ ID NOs: 1587-1627, 1747-1840, 1859-1862, or 1879-1881; and
a half-life extending domain.

44. The molecule of claim 43, wherein the half-life extending domain is an Fc-containing polypeptide.

45. A pharmaceutical composition comprising:
a molecule of any one of claims 1-44; and
a pharmaceutically acceptable excipient.

46. A method of reducing body weight and/or food intake in a subject in need thereof, the method comprising administering a molecule of any one of claims 1-44 or a pharmaceutical composition of claim 45 to the subject.

47. A molecule of any one of claims 1-44 or a pharmaceutical composition of claim 45 for use in a method of reducing body weight and/or food intake in a subject in need thereof.

48. A method of reducing body weight and/or food intake in a subject in need thereof, the method comprising administering a molecule of any one of claims 1-44 or a pharmaceutical composition of claim 45 to the subject in combination with a GLP-1 agonist.

49. A molecule of any one of claims 1-44 or a pharmaceutical composition of claim 45 for use in a method of reducing body weight and/or food intake in a subject in need thereof, wherein the method comprises administering the molecule or pharmaceutical composition to the subject in combination with a GLP-1 agonist.

50. The method of claim 48 or the molecule or pharmaceutical composition for use of claim 49, wherein the subject is overweight or obese and the GLP-1 agonist is semaglutide.

The application's sequence listing, which the Patent Office published only in electronic form, follows.

SEQUENCE LISTING (1881 sequences)

SEQ ID NO: 1 - protein, 111 aa, synthetic construct
QSVLTQPPSASGTPGQRVTISCSGSSSNIGSNTVNWYQHLPGTAPKLLIYTNNQRPSGVPDRFSGSKSGTSASLAISGLQSEDEADYFCATFDDSLNGPVFGGGTKLTVLG

SEQ ID NO: 2 - protein, 108 aa, synthetic construct
DIQMTQSPSSLSASIGDRVTITCRASQDIRDYLGWYQQKPGKAPKRLIYGASSLQSGVPSRFSGSGSGTEFTLTISSLQPEDFATYYCLQHNNYPFTFGPGTKVDIKR

SEQ ID NO: 3 - protein, 108 aa, synthetic construct; identical to SEQ ID NO: 2

SEQ ID NO: 4 - protein, 107 aa, synthetic construct
DIQMTQSPSSLSASVGDRVTITCQASQDISNYLNWYQQKPGKAPKLLIYDASNLETGVPSRFSGSGSGTDFSFTISSLQPEDIATYYCQQYDILLTFGGGTKVEIKR

SEQ ID NO: 5 - protein, 114 aa, synthetic construct
DIVMTQSPDSLAVSLGERATINCKSSQSVLSSSNNKNYIAWYQQQPGHPPKLLIYWASTRESGVPDRFSGSGSGTDFTLTISSLQAEDVAVFYCQQYYSTPWTFGQGTKVEIKR

SEQ ID NO: 6 - protein, 114 aa, synthetic construct
DIVMTQSPDSLAVSLGERATINCKSSQSVLSSSNNKNYIAWYQQKPGHPPKLLIYWASTRESGVPDRFSGSGSGTDFTLTISSLQAEDVAVFYCQQYYSTPWTFGQGTKVEIKR

SEQ ID NO: 7 - protein, 114 aa, synthetic construct
DIVMTQSPDSLSVSLGERATINCKSSQSVLSSSNNKNYLAWYQQKPGQPPNLLIYWTSTRDSGVPDRFSGSGSGTDFTLTINSLQAEDVAVYYCQQYYRTPWTFGQGTKVEIKR

SEQ ID NO: 8 - protein, 114 aa, synthetic construct; identical to SEQ ID NO: 7

SEQ ID NO: 9 - protein, 109 aa, synthetic construct
EIVLTQSPGTLSLSPGERATLSCRASQSISYSYLAWYQQKPGQAPRLLIYGASSRATGIPDRFSGSGSGTDFTLTISRQEPDDFAVYYCQQYGSSPLTFGGGTKVEIKR

SEQ ID NO: 10 - protein, 108 aa, synthetic construct
EIVMTQSPATLSVSPGERATLSCRASQSVSSNLAWYQQKPGQAPRLLIYGAATRATGIPARVSGSGSGTEFTLTISSLQSEDFAVYYCQQYNNWPLTFGGGTKVEIKR

SEQ ID NO: 11 - protein, 108 aa, synthetic construct
DIQMTQSPSSLSASVGDRVTITCRASQGIRNELGWYQQKPGKAPKRLIYGASSLQSGVPSRFSGSGSGTEFTLTISSLQPEDFVTYYCLQHNSYPFTFGPGTKVDVKR

SEQ ID NO: 12 - protein, 107 aa, synthetic construct
DIQMTQSPSSLSASVGDRVTITCQASQDITNYLNWYQQKPGKAPKLLIYDASNLEPGVPSRFSGSGSGTDFTFTISSLQPEDIATYYCQQYDDLFTFGPGTKVDIKR

SEQ ID NO: 13 - protein, 108 aa, synthetic construct
DIQMTQSPSSVSASVGDRVTITCRASQGLIIWLAWYQQKPGKAPKLLIYAASSLQSGVPSRFSGSGSGTDFTLTISSLQPEDFATYYCQQTNSFPPTFGQGTKVEIKR

SEQ ID NO: 14 - protein, 108 aa, synthetic construct; identical to SEQ ID NO: 13

SEQ ID NO: 15 - protein, 108 aa, synthetic construct
DIQMTQSPSSLSASVGDRVTITCRASQGIRNELGWYQQKPGKAPKLLIYGASSLQSGVPSRFSGSGSGTEFTLTISSLQPEDFVTYYCLQHNSYPFTFGQGTKVDVKR

SEQ ID NO: 16 - protein, 108 aa, synthetic construct; identical to SEQ ID NO: 15

SEQ ID NO: 17 - protein, 108 aa, synthetic construct; identical to SEQ ID NO: 15

SEQ ID NO: 18 - protein, 108 aa, synthetic construct
DIQMTQSPSSLSASVGDRVTITCRASQGIRNELGWYQQKPGKAPKLLIYGASSLQSGVPSRFSGSGSGTEFTLTISSLQPEDFVTYYCLQHNSYPFTFGPGTKVDVKR

SEQ ID NO: 19 - protein, 108 aa, synthetic construct
DIQMTQSPSSLSASVGDRVTITCRASQGIRNELGWYQQKPGKAPKRLIYGASSLQSGVPSRFSGSGSGTEFTLTISSLQPEDFVTYYCLQHNSYPFTFGQGTKVDVKR

SEQ ID NO: 20 - protein, 108 aa, synthetic construct; identical to SEQ ID NO: 15

SEQ ID NO: 21 - protein, 108 aa, synthetic construct
DIQMTQSPSSLSASIGDRVTITCRASQDIRDYLGWYQQKPGKAPKLLIYGASSLQSGVPSRFSGSGSGTEFTLTISSLQPEDFATYYCLQHNNYPFTFGQGTKVDIKR

SEQ ID NO: 22 - protein, 108 aa, synthetic construct
DIQMTQSPSSLSASIGDRVTITCRASQDIRDYLGWYQQKPGKAPKRLIYGASSLQSGVPSRFSGSGSGTEFTLTISSLQPEDFATYYCLQHNNYPFTFGQGTKVDIKR

SEQ ID NO: 23 - protein, 108 aa, synthetic construct
DIQMTQSPSSLSASIGDRVTITCRASQDIRDYLGWYQQKPGKAPKLLIYGASSLQSGVPSRFSGSGSGTEFTLTISSLQPEDFATYYCLQHNNYPFTFGPGTKVDIKR

SEQ ID NO: 24 - protein, 108 aa, synthetic construct; identical to SEQ ID NO: 21

SEQ ID NO: 25 - protein, 108 aa, synthetic construct; identical to SEQ ID NO: 21

SEQ ID NO: 26 - protein, 108 aa, synthetic construct; identical to SEQ ID NO: 21

SEQ ID NO: 27 - protein, 108 aa, synthetic construct; identical to SEQ ID NO: 21

SEQ ID NO: 28 - protein, 108 aa, synthetic construct
DIQMTQSPSSLSASIGDRVTITCRASQDLRNYLGWYHQKPGKAPKRLIYGASSLQSGVPSRFSGSGSGTEFTLTISSLQPEDFATYYCLQHNNYPFTFGPGTKVDIKR

SEQ ID NO: 29 - protein, 108 aa, synthetic construct
DIQMTQSPSSLSASIGDRVTITCRASQDLRNYLGWYQQKPGKAPKLLIYGASSLQSGVPSRFSGSGSGTEFTLTISSLQPEDFATYYCLQHNNYPFTFGPGTKVDIKR

SEQ ID NO: 30 - protein, 108 aa, synthetic construct; identical to SEQ ID NO: 29

SEQ ID NO: 31 - protein, 108 aa, synthetic construct
DIQMTQSPSSLSASIGDRVTITCRASQDLRNYLGWYHQKPGKAPKLLIYGASSLQSGVPSRFSGSGSGTEFTLTISSLQPEDFATYYCLQHNNYPFTFGPGTKVDIKR

SEQ ID NO: 32 - protein, 108 aa, synthetic construct
DIQMTQSPSSLSASIGDRVTITCRASQDLRNYLGWYQQKPGKAPKRLIYGASSLQSGVPSRFSGSGSGTEFTLTISSLQPEDFATYYCLQHNNYPFTFGPGTKVDIKR

SEQ ID NO: 33 - protein, 108 aa, synthetic construct; identical to SEQ ID NO: 32

SEQ ID NO: 34 - protein, 108 aa, synthetic construct; identical to SEQ ID NO: 31

SEQ ID NO: 35 - protein, 108 aa, synthetic construct; identical to SEQ ID NO: 28

SEQ ID NO: 36 - protein, 108 aa, synthetic construct; identical to SEQ ID NO: 29

SEQ ID NO: 37 - protein, 108 aa, synthetic construct; identical to SEQ ID NO: 29

SEQ ID NO: 38 - protein, 108 aa, synthetic construct
DIQMTQSPSSLSASIGDRVTITCRASQDLRNYLGWYQQKPGKAPKLLIYGASSLQSGVPSRFSGSGSGTEFTLTISSLQPEDFATYYCLQHNNYPFTFGQGTKVDIKR

SEQ ID NO: 39 - protein, 108 aa, synthetic construct; identical to SEQ ID NO: 29

SEQ ID NO: 40 - protein, 107 aa, synthetic construct
DIQMTQSPSSLSASVGDRVTITCQASQDISNYLNWYQQKPGKAPKLLIYDASNLETGVPSRFSGSGSGTDFSLTISSLQPEDFATYYCQQYDILLTFGGGTKVEIKR

SEQ ID NO: 41 - protein, 107 aa, synthetic construct; identical to SEQ ID NO: 40

SEQ ID NO: 42 - protein, 107 aa, synthetic construct
DIQMTQSPSSLSASVGDRVTITCQASQDISNYLNWYQQKPGKAPKLLIYDASNLETGVPSRFSGSGSGTDFSLTISSLQPEDIATYYCQQYDILLTFGGGTKVEIKR

SEQ ID NO: 43 - protein, 107 aa, synthetic construct
DIQMTQSPSSLSASVGDRVTITCQASQDISNYLNWYQQKPGKAPKLLIYDASNLETGVPSRFSGSGSGTDFSFTISSLQPEDFATYYCQQYDILLTFGGGTKVEIKR

SEQ ID NO: 44 - protein, 107 aa, synthetic construct; identical to SEQ ID NO: 42

SEQ ID NO: 45 - protein, 107 aa, synthetic construct; identical to SEQ ID NO: 43

SEQ ID NO: 46 - protein, 107 aa, synthetic construct; identical to SEQ ID NO: 4

SEQ ID NO: 47 - protein, 107 aa, synthetic construct; identical to SEQ ID NO: 40

SEQ ID NO: 48 - protein, 107 aa, synthetic construct; identical to SEQ ID NO: 40

SEQ ID NO: 49 - protein, 108 aa, synthetic construct; identical to SEQ ID NO: 2

SEQ ID NO: 50 - protein, 108 aa, synthetic construct; identical to SEQ ID NO: 2

SEQ ID NO: 51 - protein, 108 aa, synthetic construct; identical to SEQ ID NO: 21

SEQ ID NO: 52 - protein, 108 aa, synthetic construct; identical to SEQ ID NO: 21

SEQ ID NO: 53 - protein, 108 aa, synthetic construct; identical to SEQ ID NO: 23

SEQ ID NO: 54 - protein, 108 aa, synthetic construct; identical to SEQ ID NO: 23

SEQ ID NO: 55 - protein, 108 aa, synthetic construct; identical to SEQ ID NO: 23

SEQ ID NO: 56 - protein, 107 aa, synthetic construct
DIQMTQSPSSLSASVGDRVTITCQASQDITNYLNWYQQKPGKAPKLLIYDASNLEPGVPSRFSGSGSGTDFTLTISSLQPEDFATYYCQQYDDLFTFGPGTKVDIKR

SEQ ID NO: 57 - protein, 107 aa, synthetic construct
DIQMTQSPSSLSASVGDRVTITCQASQDITNYLNWYQQKPGKAPKLLIYDASNLEPGVPSRFSGSGSGTDFTLTISSLQPEDIATYYCQQYDDLFTFGPGTKVDIKR

SEQ ID NO: 58 - protein, 107 aa, synthetic construct; identical to SEQ ID NO: 56

SEQ ID NO: 59 - protein, 107 aa, synthetic construct
DIQMTQSPSSLSASVGDRVTITCQASQDITNYLNWYQQKPGKAPKLLIYDASNLEPGVPSRFSGSGSGTDFTFTISSLQPEDFATYYCQQYDDLFTFGPGTKVDIKR

SEQ ID NO: 60 - protein, 107 aa, synthetic construct; identical to SEQ ID NO: 57

SEQ ID NO: 61 - protein, 107 aa, synthetic construct; identical to SEQ ID NO: 59

SEQ ID NO: 62 - protein, 107 aa, synthetic construct; identical to SEQ ID NO: 12

SEQ ID NO: 63 - protein, 107 aa, synthetic construct; identical to SEQ ID NO: 56

SEQ ID NO: 64 - protein, 107 aa, synthetic construct; identical to SEQ ID NO: 56

SEQ ID NO: 65 - protein, 107 aa, synthetic construct
DIQMTQSPSSLSASVGDRVTITCQASQDITNYLNWYQQKPGKAPKLLIYDASNLEPGVPSRFSGSGSGTDFTLTISSLQPEDFATYYCQQYDDLFTFGQGTKVDIKR

SEQ ID NO: 66 - protein, 107 aa, synthetic construct; identical to SEQ ID NO: 65

SEQ ID NO: 67 - protein, 108 aa, synthetic construct
EIVLTQSPGTLSLSPGERATLSCRASQIFTSTYLAWYQQKPGQAPRLLIYGASSRATGIPDRFSGSGSGTDFTLTISRLEPEDFAVYYCQQYGSSPRFGQGTRLEIKR

SEQ ID NO: 68 - protein, 108 aa, synthetic construct; identical to SEQ ID NO: 67

SEQ ID NO: 69 - protein, 108 aa, synthetic construct; identical to SEQ ID NO: 67

SEQ ID NO: 70 - protein, 108 aa, synthetic construct; identical to SEQ ID NO: 67

SEQ ID NO: 71 - protein, 108 aa, synthetic construct
EIVMTQSPATLSVSPGERATLSCRASQSVSSNLAWYQQKPGQAPRLLIYGAATRATGIPARFSGSGSGTEFTLTISSLQSEDFAVYYCQQYNNWPLTFGGGTKVEIKR

SEQ ID NO: 72 - protein, 108 aa, synthetic construct; identical to SEQ ID NO: 71

SEQ ID NO: 73 - protein, 108 aa, synthetic construct; identical to SEQ ID NO: 71

SEQ ID NO: 74 - protein, 108 aa, synthetic construct; identical to SEQ ID NO: 10

SEQ ID NO: 75 - protein, 108 aa, synthetic construct
EIVMTQSPATLSVSPGERATLSCRASQSVSSNLAWYQQKPGQAPRLLIYGAATRATGIPARFSGSGSGTEFTLTISSLEPEDFAVYYCQQYNNFPLTFGGGTKVEIKR

SEQ ID NO: 76 - protein, 108 aa, synthetic construct
EIVMTQSPATLSVSPGERATLSCRASQSVSSNLAWYQQKPGQAPRLLIYGAATRATGIPARFSGSGSGTEFTLTISSLEPEDFAVYYCQQYNNYPLTFGGGTKVEIKR

SEQ ID NO: 77 - protein, 108 aa, synthetic construct
EIVMTQSPATLSVSPGERATLSCRASQSVSSNLAWYQQKPGQAPRLLIYGAATRATGIPARFSGSGSGTEFTLTISSLEPEDFAVYYCQQYNNWPLTFGGGTKVEIKR

SEQ ID NO: 78 - protein, 108 aa, synthetic construct; identical to SEQ ID NO: 77

SEQ ID NO: 79 - protein, 109 aa, synthetic construct
EIVLTQSPGTLSLSPGERATLSCRASQSISYSYLAWYQQKPGQAPRLLIYGASSRATGIPDRFSGSGSGTDFTLTISRLEPDDFAVYYCQQYGSSPLTFGGGTKVEIKR

SEQ ID NO: 80 - protein, 109 aa, synthetic construct; identical to SEQ ID NO: 9

SEQ ID NO: 81 - protein, 109 aa, synthetic construct; identical to SEQ ID NO: 79

SEQ ID NO: 82 - protein, 109 aa, synthetic construct; identical to SEQ ID NO: 79

SEQ ID NO: 83 - protein, 109 aa, synthetic construct; identical to SEQ ID NO: 79

SEQ ID NO: 84 - protein, 109 aa, synthetic construct; identical to SEQ ID NO: 9

SEQ ID NO: 85 - protein, 109 aa, synthetic construct; identical to SEQ ID NO: 9

SEQ ID NO: 86 - protein, 114 aa, synthetic construct; identical to SEQ ID NO: 5

SEQ ID NO: 87 - protein, 114 aa, synthetic construct; identical to SEQ ID NO: 5

SEQ ID NO: 88 - protein, 114 aa, synthetic construct; identical to SEQ ID NO: 5

SEQ ID NO: 89 - protein, 114 aa, synthetic construct; identical to SEQ ID NO: 5

SEQ ID NO: 90 - protein, 114 aa, synthetic construct; identical to SEQ ID NO: 5

SEQ ID NO: 91 - protein, 114 aa, synthetic construct; identical to SEQ ID NO: 5

SEQ ID NO: 92 - protein, 114 aa, synthetic construct; identical to SEQ ID NO: 5

SEQ ID NO: 93 - protein, 114 aa, synthetic construct; identical to SEQ ID NO: 5

SEQ ID NO: 94 - protein, 114 aa, synthetic construct; identical to SEQ ID NO: 5

SEQ ID NO: 95 - protein, 114 aa, synthetic construct
DIVMTQSPDSLAVSLGERATINCKSSQSVLSSSNNKNYIAWYQQKPGQPPKLLIYWASTRESGVPDRFSGSGSGTDFTLTISSLQAEDVAVFYCQQYYSTPWTFGQGTKVEIKR

SEQ ID NO: 96 - protein, 114 aa, synthetic construct; identical to SEQ ID NO: 95

SEQ ID NO: 97 - protein, 114 aa, synthetic construct
DIVMTQSPDSLSVSLGERATINCKSSQSVLSSSNNKNYLAWYQQKPGQPPNLLIYWTSTRESGVPDRFSGSGSGTDFTLTINSLQAEDVAVYYCQQYYRTPWTFGQGTKVEIKR

SEQ ID NO: 98 - protein, 114 aa, synthetic construct; identical to SEQ ID NO: 97

SEQ ID NO: 99 - protein, 114 aa, synthetic construct; identical to SEQ ID NO: 7

SEQ ID NO: 100 - protein, 114 aa, synthetic construct; identical to SEQ ID NO: 97

SEQ ID NO: 101 - protein, 114 aa, synthetic construct; identical to SEQ ID NO: 97

SEQ ID NO: 102 - protein, 114 aa, synthetic construct; identical to SEQ ID NO: 7

SEQ ID NO: 103 - protein, 114 aa, synthetic construct; identical to SEQ ID NO: 7

SEQ ID NO: 104 - protein, 114 aa, synthetic construct
DIVMTQSPDSLAVSLGERATINCKSSQSVLSSSNNKNYLAWYQQKPGQPPKLLIYWTSTRESGVPDRFSGSGSGTDFTLTINSLQAEDVAVYYCQQYYRTPWTFGQGTKVEIKR

SEQ ID NO: 105 - protein, 114 aa, synthetic construct; identical to SEQ ID NO: 97

SEQ ID NO: 106 - protein, 114 aa, synthetic construct; identical to SEQ ID NO: 6

SEQ ID NO: 107 - protein, 114 aa, synthetic construct; identical to SEQ ID NO: 6

SEQ ID NO: 108 - protein, 114 aa, synthetic construct; identical to SEQ ID NO: 6

SEQ ID NO: 109 - protein, 114 aa, synthetic construct; identical to SEQ ID NO: 95

SEQ ID NO: 110 - protein, 114 aa, synthetic construct; identical to SEQ ID NO: 95

SEQ ID NO: 111 - protein, 114 aa, synthetic construct; identical to SEQ ID NO: 7

SEQ ID NO: 112 - protein, 114 aa, synthetic construct; identical to SEQ ID NO: 7

SEQ ID NO: 113 - protein, 114 aa, synthetic construct; identical to SEQ ID NO: 7

SEQ ID NO: 114 - protein, 114 aa, synthetic construct; identical to SEQ ID NO: 7

SEQ ID NO: 115 - protein, 114 aa, synthetic construct; identical to SEQ ID NO: 7

SEQ ID NO: 116 - protein, 114 aa, synthetic construct; identical to SEQ ID NO: 7

SEQ ID NO: 117 - protein, 114 aa, synthetic construct; identical to SEQ ID NO: 7

SEQ ID NO: 118 - protein, 114 aa, synthetic construct; identical to SEQ ID NO: 97

SEQ ID NO: 119 - protein, 114 aa, synthetic construct; identical to SEQ ID NO: 97

SEQ ID NO: 120 - protein, 114 aa, synthetic construct; identical to SEQ ID NO: 97

SEQ ID NO: 121 - protein, 114 aa, synthetic construct; identical to SEQ ID NO: 97

SEQ ID NO: 122 - protein, 114 aa, synthetic construct
DIVMTQSPDSLAVSLGERATINCKSSQSVLSSSNNKNYLAWYQQKPGQPPKLLIYWTSTRDSGVPDRFSGSGSGTDFTLTINSLQAEDVAVYYCQQYYRTPWTFGQGTKVEIKR

SEQ ID NO: 123 - protein, 114 aa, synthetic construct; identical to SEQ ID NO: 104

SEQ ID NO: 124 - protein, 111 aa, synthetic construct
QSVLTQPPSASGTPGQRVTISCSGSSSNIGSQTVNWYQHLPGTAPKLLIYTNNQRPSGVPDRFSGSKSGTSASLAISGLQSEDEADYFCATFDESLSGPVFGGGTKLTVLG

SEQ ID NO: 125 - protein, 111 aa, synthetic construct
QSVLTQPPSASGTPGQRVTISCSGSSSNIGSQTVNWYQHLPGTAPKLLIYTNNQRPSGVPDRFSGSKSGTSASLAISGLQSEDEADYFCATFDESLQGPVFGGGTKLTVLG

SEQ ID NO: 126 - protein, 111 aa, synthetic construct
QSVLTQPPSASGTPGQRVTISCSGSSSNIGSNYVNWYQHLPGTAPKLLIYTNNQRPSGVPDRFSGSKSGTSASLAISGLQSEDEADYFCATFDESLSGPVFGGGTKLTVLG

SEQ ID NO: 127 - protein, 111 aa, synthetic construct
QSVLTQPPSASGTPGQRVTISCSGSSSNIGSNYVNWYQHLPGTAPKLLIYTNNQRPSGVPDRFSGSKSGTSASLAISGLQSEDEADYFCATFDESLQGPVFGGGTKLTVLG

SEQ ID NO: 128 - protein, 111 aa, synthetic construct
QSVLTQPPSASGTPGQRVTISCSGSSSNIGSQTVNWYQHLPGTAPKLLIYTNNQRPSGVPDRFSGSKSGTSASLAISGLQSEDEADYFCATFDDSLNGPVFGGGTKLTVLG

SEQ ID NO: 129 - protein, 111 aa, synthetic construct
QSVLTQPPSASGTPGQRVTISCSGSSSNIGSNYVNWYQHLPGTAPKLLIYTNNQRPSGVPDRFSGSKSGTSASLAISGLQSEDEADYFCATFDDSLNGPVFGGGTKLTVLG

SEQ ID NO: 130 - protein, 111 aa, synthetic construct
QSVLTQPPSASGTPGQRVTISCSGSSSNIGSNTVNWYQHLPGTAPKLLIYTNNQRPSGVPDRFSGSKSGTSASLAISGLQSEDEADYFCATFDESLNGPVFGGGTKLTVLG

SEQ ID NO: 131 - protein, 111 aa, synthetic construct
QSVLTQPPSASGTPGQRVTISCSGSSSNIGSNTVNWYQHLPGTAPKLLIYTNNQRPSGVPDRFSGSKSGTSASLAISGLQSEDEADYFCATFDDSLQGPVFGGGTKLTVLG

SEQ ID NO: 132 - protein, 111 aa, synthetic construct
QSVLTQPPSASGTPGQRVTISCSGSSSNIGSNTVNWYQHLPGTAPKLLIYTNNQRPSGVPDRFSGSKSGTSASLAISGLQSEDEADYFCATFDDSLSGPVFGGGTKLTVLG

SEQ ID NO: 133 - protein, 111 aa, synthetic construct
QSVLTQPPSASGTPGQRVTISCSGSSSNIGSNTVNWYQHLPGTAPKLLIYTNNQRPSGVPDRFSGSKSGTSASLAISGLQSEDEADYFCATFDDSLNAPVFGGGTKLTVLG

SEQ ID NO: 134 - protein, 111 aa, synthetic construct
QSVLTQPPSASGTPGQRVTISCSGSSSNIGSNTVNWYQHLPGTAPKLLIYTNNQRPSGVPDRFSGSKSGTSASLAISGLQSEDEADYFCATFDSSLNGPVFGGGTKLTVLG

SEQ ID NO: 135 - protein, 111 aa, synthetic construct
QSVLTQPPSASGTPGQRVTISCSGSSSNIGSNYVNWYQHLPGTAPKLLIYTNNQRPSGVPDRFSGSKSGTSASLAISGLQSEDEADYFCATFDSSLNAPVFGGGTKLTVLG

SEQ ID NO: 136 - protein, 111 aa, synthetic construct; identical to SEQ ID NO: 135

SEQ ID NO: 137 - protein, 111 aa, synthetic construct; identical to SEQ ID NO: 124

SEQ ID NO: 138 - protein, 108 aa, synthetic construct
DIQMTQSPSSLSASIGDRVTITCRASQDLRNYLGWYQQKPGKAPKRLIYGASSLQSGVPSRFSGSGSGTEFTLTISSLQPEDFATYYCLQHNNYPFTFGQGTKVDIKR

SEQ ID NO: 139 - protein, 108 aa, synthetic construct; identical to SEQ ID NO: 22

SEQ ID NO: 140 - protein, 111 aa, synthetic construct
QSVLTQPPSASGTPGQRVTISCSGSSSNIGSNTVNWYQQLPGTAPKLLIYTNNQRPSGVPDRFSGSKSGTSASLAISGLQSEDEADYFCATFDSSLSGPVFGGGTKLTVLG

SEQ ID NO: 141 - protein, 108 aa, synthetic construct
DIQLTQSPSSLSASVGDRVTITCRASQTISRFLNWYQQKPGKAPELLIYVASSLQSGVPSRFSGSGSGTDFTLTISSLQPEDFATYYCQQSYSTLISFGQGTKLEITR

SEQ ID NO: 142 - protein, 111 aa, synthetic construct
QSVLTQPPSVSAAPGQKVTISCSGSSSNIGNNYVSWYEQFPGTAPKLLIYDNNKRPSGIPDRFSGSKSGTSATLGITGLQTGDEADYYCGTWDSSLSAVVFGGGTKLTVLG

SEQ ID NO: 143 - protein, 108 aa, synthetic construct
DIQLTQSPSSLSASVGDRVTITCRASQTISRFLNWYQQKPGKAPELLIYVASSLQSGVPSRFSGSGSGTDFTLTISSLQPEDFATYYCQQSYSTLISFGQGTKLEIKR

SEQ ID NO: 144 - protein, 108 aa, synthetic construct; identical to SEQ ID NO: 143

SEQ ID NO: 145 - protein, 108 aa, synthetic construct; identical to SEQ ID NO: 141

SEQ ID NO: 146 - protein, 108 aa, synthetic construct
DIQLTQSPSSLSASVGDRVTITCRASQTISRFLNWYQQKPGKAPKLLIYVASSLQSGVPSRFSGSGSGTDFTLTISSLQPEDFATYYCQQSYSTLISFGQGTKLEIKR

SEQ ID NO: 147 - protein, 108 aa, synthetic construct; identical to SEQ ID NO: 143

SEQ ID NO: 148 - protein, 108 aa, synthetic construct; identical to SEQ ID NO: 143

SEQ ID NO: 149 - protein, 111 aa, synthetic construct
QSVLTQPPSVSAAPGQKVTISCSGSSSNIGNNYVSWYQQLPGTAPKLLIYDNNKRPSGIPDRFSGSKSGTSATLGITGLQTGDEADYYCGTWDSSLSAVVFGGGTKLTVLG

SEQ ID NO: 150 - protein, 111 aa, synthetic construct; identical to SEQ ID NO: 149

SEQ ID NO: 151 - protein, 111 aa, synthetic construct; identical to SEQ ID NO: 142

SEQ ID NO: 152 - protein, 111 aa, synthetic construct
QSVLTQPPSVSAAPGQKVTISCSGSSSNIGNNYVSWYQQLPGTAPKLLIYDNNKRPSGIPDRFSGSKSGTSATLAITGLQTGDEADYYCGTFESSLSAVVFGGGTKLTVLG

SEQ ID NO: 153 - protein, 111 aa, synthetic construct
QSVLTQPPSVSAAPGQKVTISCSGSSSNIGNNYVSWYQQLPGTAPKLLIYDNNKRPSGIPDRFSGSKSGTSATLAITGLQTGDEADYYCGTWDSSLSAVVFGGGTKLTVLG

SEQ ID NO: 154 - protein, 111 aa, synthetic construct; identical to SEQ ID NO: 153

SEQ ID NO: 155 - protein, 111 aa, synthetic construct; identical to SEQ ID NO: 149

SEQ ID NO: 156 - protein, 111 aa, synthetic construct; identical to SEQ ID NO: 152

SEQ ID NO: 157 - protein, 108 aa, synthetic construct
DIQLTQSPSSLSASVGDRVTITCRASQTISRFLNWYQQKPGKAPKLLIYVASSLQSGVPSRFSGSGSGTDFTLTISSLQPEDFATYYCQQSYSTLLSFGQGTKLEIKR

SEQ ID NO: 158 - protein, 128 aa, synthetic construct
QMQVVQSGAEVKKPGASVKVSCKASGYTFTGYYMHWVRQAPGQGLEWMGWINPNSGGTNYAQKFQGRVTMTRDTSISTAYMELSRLRSDDTAVYYCARGGDYVWGTYRPHYYYGMDVWGQGTTVTVSS

SEQ ID NO: 159 - protein, 121 aa, synthetic construct
QVQLVESGGGVVQPGRSLRLSCAASGFTFSNFGMHWVRQAPGKGLEWVAVIWYDGSNENYADSVKGRFTISRDNSKNTLYLHMNSLRVADTAVYYCARDGTIFGVVLGDYWGQGTLVTVSS

SEQ ID NO: 160 - protein, 121 aa, synthetic construct
QVQLVESGGGVVQPGRSLRLSCAASGFTFSYFGMHWVRQAPGKGLEWVAVIWYDGSNKYYADSVKGRFTISRDNSKNTLYLQMNSLRAEDTAVYYCARDGTIFGVLLGDYWGQGTLVTVSS

SEQ ID NO: 161 - protein, 120 aa, synthetic construct
QVQLVESGGGVVQPGRSLRLSCAASGFTFSSYGMHWVRQAPGKGLEWVAVIWYDGSNKYYADSVKGRFTISSDNSKNTLYLQMNSLRAEDTAVYYCARDRTIFGVVLDYWGQGTLVTVSS

SEQ ID NO: 162 - protein, 123 aa, synthetic construct
QVPLVQSGAEVKKPGASVKVSCKASGYTFTGYYIHWVRQAPGQGLEWMGWINPDSGGTDYSQRFQGRFTMTRDTSISTAYMELNRLRSDDTAVYYCAREATIFGMVIVPFDYWGQGTLVTVSS

SEQ ID NO: 163 - protein, 123 aa, synthetic construct
QVPLVQSGAEVKKPGASVKVSCKASGYTFTGYYIHWVRQAPGQGLEWMGWINPDSGGTDYSQRFQGRFTMTRDTSISTAYMELSRLRSDDTAVYYCAREATIFGMVIVPFDYWGQGTLVTVSS

SEQ ID NO: 164 - protein, 123 aa, synthetic construct
QVPLVQSGAEVKKPGASVKVSCKASGYTFTGYYIHWVRQAPGQGLVWMGWISPNSGDTSYAQKFQDRVTMTRDTSISTAYMELSRLRSDDTAVYFCTREATIFGMLIVPFDYWGQGTLVTVSS

SEQ ID NO: 165 - protein, 123 aa, synthetic construct
QVPLVQSGAEVKKPGASVKVSCKASGYTFTGYYIHWVRQAPGQGLEWMGWISPNNGDTNYAQKFQDRVTMTRDTSISTAYMELSRLRSDDTAVYYCTREATIFGMLIVPFDYWGQGTLVTVSS

SEQ ID NO: 166 - protein, 126 aa, synthetic construct
QVQLQESGPGLVKPSQTLSLTCTVSGDSISSGGYYWSWIRQHPGKGLEWIGYIYYSGSTYYNPSLKSRVTISVDTSKNQFSLKLSSVTAADTAVYYCARDRITIFGVVMGGGMDVWGQGTTVTVSS

SEQ ID NO: 167 - protein, 120 aa, synthetic construct
QVQLVESGGGVVQPGRSLRLSCAASGFTFSNYGMHWVRQAPGEGLEWVAAIWFDGSDKYYADSVKGRFTISRDNSKNTLYLQMNSLRAEDTAVYYCARDQAIFGVVPDYWGQGTLVTVSS

SEQ ID NO: 168 - protein, 121 aa, synthetic construct; identical to SEQ ID NO: 160

SEQ ID NO: 169 - protein, 120 aa, synthetic construct
QVQLVESGGGVVQPGRSLRLSCAASGFSFSSYGMHWVRQPPGKGLEWVAAIWYDGNNKYYADSVKGRFTISRDSSKNTLYLQMNSLRAEDTAVYYCARDRTIFGVVLEYLGQGTLVTVSS

SEQ ID NO: 170 - protein, 117 aa, synthetic construct
QVQLQESGPGLVKPSETLSLTCTVSQGSISSYYWSWIRQPAGKGLEWIGRIYTSGSTNYNPSLKSRVTMSIDTSKNQFSLKLNSVTAADTAVYYCARDVAVAGFDYWGQGTLVTVSS

SEQ ID NO: 171 - protein, 117 aa, synthetic construct
QVQLQESGPGLVKPSETLSLTCTVSGGSISSYYWSWIRQPAGKGLEWIGRIYTSGSTNYNPSLKSRVTMSIDTSKNQFSLKLNSVTAADTAVYYCARDVAVAGFDYWGQGTLVTVSS

SEQ ID NO: 172 - protein, 121 aa, synthetic construct
QVQLVESGGGVVQPGRSLRLSCAASGFTFSYFGMHWVRQAPGKGLEWVAVIWYDASNKYYADAVKGRFTISRDNSKNTLYLQMNSLRAEDTAVYYCARDGTIFGVLLGDYWGQGTLVTVSS

SEQ ID NO: 173 - protein, 121 aa, synthetic construct
QVQLVESGGGVVQPGRSLRLSCAASGFTFSYFGMHWVRQAPGKGLEWVAVIWYDASNKYYADSVKGRFTISRDNSKNTLYLQMNSLRAEDTAVYYCARDGTIFGVLLGDYWGQGTLVTVSS

SEQ ID NO: 174 - protein, 121 aa, synthetic construct
QVQLVESGGGVVQPGRSLRLSCAASGFTFSYFGMHWVRQAPGKGLEWVAVIWYDGSNKYYADAVKGRFTISRDNSKNTLYLQMNSLRAEDTAVYYCARDGTIFGVLLGDYWGQGTLVTVSS

SEQ ID NO: 175 - protein, 121 aa, synthetic construct; identical to SEQ ID NO: 172

SEQ ID NO: 176 - protein, 121 aa, synthetic construct; identical to SEQ ID NO: 172

SEQ ID NO: 177 - protein, 121 aa, synthetic construct
QVQLVESGGGVVQPGRSLRLSCAASGFTFSYFGMHWVRQAPGKGLEWVAVIWYDASNKYYADAVKGRFTISRDNSKNTLYLQMNSLRAEDTAVYYCARDRTIFGVLLGDYWGQGTLVTVSS

SEQ ID NO: 178 - protein, 121 aa, synthetic construct
QVQLVESGGGVVQPGRSLRLSCAASGFTFSNFGMHWVRQAPGKGLEWVAVIWYDASNENYADAVKGRFTISRDNSKNTLYLQMNSLRVADTAVYYCARDGTIFGVVLGDYWGQGTLVTVSS

SEQ ID NO: 179 - protein, 121 aa, synthetic construct; identical to SEQ ID NO: 178

SEQ ID NO: 180 - protein, 121 aa, synthetic construct; identical to SEQ ID NO: 178

SEQ ID NO: 181 - protein, 121 aa, synthetic construct
QVQLVESGGGVVQPGRSLRLSCAASGFTFSNFGMHWVRQAPGKGLEWVAVIWYDASNENYADSVKGRFTISRDNSKNTLYLHMNSLRVADTAVYYCARDGTIFGVVLGDYWGQGTLVTVSS

SEQ ID NO: 182 - protein, 121 aa, synthetic construct
QVQLVESGGGVVQPGRSLRLSCAASGFTFSNFGMHWVRQAPGKGLEWVAVIWYDGSNENYADAVKGRFTISRDNSKNTLYLHMNSLRVADTAVYYCARDGTIFGVVLGDYWGQGTLVTVSS

SEQ ID NO: 183 - protein, 121 aa, synthetic construct
QVQLVESGGGVVQPGRSLRLSCAASGFTFSNFGMHWVRQAPGKGLEWVAVIWYDASNENYADAVKGRFTISRDNSKNTLYLQMNSLRVEDTAVYYCARDRTIFGVVLGDYWGQGTLVTVSS

SEQ ID NO: 184 - protein, 121 aa, synthetic construct
QVQLVESGGGVVQPGRSLRLSCAASGFTFSNFGMHWVRQAPGKGLEWVAVIWYDASNENYADAVKGRFTISRDNSKNTLYLQMNSLRVEDTAVYYCARDGTIFGVVLGDYWGQGTLVTVSS

SEQ ID NO: 185 - protein, 121 aa, synthetic construct
QVQLVESGGGVVQPGRSLRLSCAASGFTFSNFGMHWVRQAPGKGLEWVAVIWYDGSNENYADSVKGRFTISRDNSKNTLYLHMNSLRAADTAVYYCARDGTIFGVVLGDYWGQGTLVTVSS

SEQ ID NO: 186 - protein, 121 aa, synthetic construct
QVQLVESGGGVVQPGRSLRLSCAASGFTFSNFGMHWVRQAPGKGLEWVAVIWYDASNENYADAVKGRFTISRDNSKNTLYLQMNSLRAADTAVYYCARDGTIFGVVLGDYWGQGTLVTVSS

SEQ ID NO: 187 - protein, 121 aa, synthetic construct
QVQLVESGGGVVQPGRSLRLSCAASGFTFSNFGMHWVRQAPGKGLEWVAVIWYDASNENYADAVKGRFTISRDNSKNTLYLHMNSLRAADTAVYYCARDGTIFGVVLGDYWGQGTLVTVSS

SEQ ID NO: 188 - protein, 121 aa, synthetic construct; identical to SEQ ID NO: 186

SEQ ID NO: 189 - protein, 121 aa, synthetic construct; identical to SEQ ID NO: 186

SEQ ID NO: 190 - protein, 121 aa, synthetic construct; identical to SEQ ID NO: 187

SEQ ID NO: 191 - protein, 121 aa, synthetic construct; identical to SEQ ID NO: 187

SEQ ID NO: 192 - protein, 121 aa, synthetic construct; identical to SEQ ID NO: 186

SEQ ID NO: 193 - protein, 121 aa, synthetic construct
QVQLVESGGGVVQPGRSLRLSCAASGFTFSNFGMHWVRQAPGKGLEWVAVIWYDGSNENYADAVKGRFTISRDNSKNTLYLQMNSLRAADTAVYYCARDGTIFGVVLGDYWGQGTLVTVSS

SEQ ID NO: 194 - protein, 121 aa, synthetic construct
QVQLVESGGGVVQPGRSLRLSCAASGFTFSNFGMHWVRQAPGKGLEWVAVIWYDASNENYADSVKGRFTISRDNSKNTLYLQMNSLRAADTAVYYCARDGTIFGVVLGDYWGQGTLVTVSS

SEQ ID NO: 195 - protein, 121 aa, synthetic construct
QVQLVESGGGVVQPGRSLRLSCAASGFTFSNFGMHWVRQAPGKGLEWVAVIWYDASNENYADAVKGRFTISRDNSKNTLYLQMNSLRAEDTAVYYCARDRTIFGVVLGDYWGQGTLVTVSS

SEQ ID NO: 196 - protein, 121 aa, synthetic construct
QVQLVESGGGVVQPGRSLRLSCAASGFTFSNFGMHWVRQAPGKGLEWVAVIWYDASNENYADAVKGRFTISRDNSKNTLYLQMNSLRAEDTAVYYCARDGTIFGVVLGDYWGQGTLVTVSS

SEQ ID NO: 197 - protein, 120 aa, synthetic construct
QVQLVESGGGVVQPGRSLRLSCAASGFTFSSYGMHWVRQAPGKGLEWVAVIWYDASNKYYADAVKGRFTISRDNSKNTLYLQMNSLRAEDTAVYYCARDRTIFGVVLDYWGQGTLVTVSS

SEQ ID NO: 198 - protein, 120 aa, synthetic construct
QVQLVESGGGVVQPGRSLRLSCAASGFTFSSYGMHWVRQAPGKGLEWVAVIWYDASNKYYADAVKGRFTISSDNSKNTLYLQMNSLRAEDTAVYYCARDRTIFGVVLDYWGQGTLVTVSS

SEQ ID NO: 199 - protein, 120 aa, synthetic construct; identical to SEQ ID NO: 197

SEQ ID NO: 200 - protein, 120 aa, synthetic construct; identical to SEQ ID NO: 197

SEQ ID NO: 201 - protein, 120 aa, synthetic construct; identical to SEQ ID NO: 198

SEQ ID NO: 202 - protein, 120 aa, synthetic construct; identical to SEQ ID NO: 198

SEQ ID NO: 203 - protein, 120 aa, synthetic construct; identical to SEQ ID NO: 197

SEQ ID NO: 204 - protein, 120 aa, synthetic construct
QVQLVESGGGVVQPGRSLRLSCAASGFTFSSYGMHWVRQAPGKGLEWVAVIWYDASNKYYADSVKGRFTISRDNSKNTLYLQMNSLRAEDTAVYYCARDRTIFGVVLDYWGQGTLVTVSS

SEQ ID NO: 205 - protein, 120 aa, synthetic construct
QVQLVESGGGVVQPGRSLRLSCAASGFTFSSYGMHWVRQAPGKGLEWVAVIWYDGSNKYYADAVKGRFTISRDNSKNTLYLQMNSLRAEDTAVYYCARDRTIFGVVLDYWGQGTLVTVSS

SEQ ID NO: 206 - protein, 121 aa, synthetic construct; identical to SEQ ID NO: 172

SEQ ID NO: 207 - protein, 121 aa, synthetic construct; identical to SEQ ID NO: 177

SEQ ID NO: 208 - protein, 121 aa, synthetic construct; identical to SEQ ID NO: 172

SEQ ID NO: 209 - protein, 121 aa, synthetic construct; identical to SEQ ID NO: 177

SEQ ID NO: 210 - protein, 121 aa, synthetic construct; identical to SEQ ID NO: 160

SEQ ID NO: 211 - protein, 121 aa, synthetic construct; identical to SEQ ID NO: 173

SEQ ID NO: 212 - protein, 121 aa, synthetic construct; identical to SEQ ID NO: 174

SEQ ID NO: 213 - protein, 120 aa, synthetic construct
QVQLVESGGGVVQPGRSLRLSCAASGFSFSSYGMHWVRQPPGKGLEWVAAIWYDANNKYYADAVKGRFTISRDSSKNTLYLQMNSLRAEDTAVYYCARDRTIFGVVLEYWGQGTLVTVSS

SEQ ID NO: 214 - protein, 120 aa, synthetic construct; identical to SEQ ID NO: 213

SEQ ID NO: 215 - protein, 120 aa, synthetic construct
QVQLVESGGGVVQPGRSLRLSCAASGFSFSSYGMHWVRQPPGKGLEWVAAIWYDANNKYYADAVKGRFTISRDSSKNTLYLQMNSLRAEDTAVYYCARDRTIFGVVLEYLGQGTLVTVSS

SEQ ID NO: 216 - protein, 120 aa, synthetic construct; identical to SEQ ID NO: 213

SEQ ID NO: 217 - protein, 120 aa, synthetic construct; identical to SEQ ID NO: 215

SEQ ID NO: 218 - protein, 120 aa, synthetic construct; identical to SEQ ID NO: 215

SEQ ID NO: 219 - protein, 120 aa, synthetic construct; identical to SEQ ID NO: 213

SEQ ID NO: 220 - protein, 120 aa, synthetic construct
QVQLVESGGGVVQPGRSLRLSCAASGFSFSSYGMHWVRQPPGKGLEWVAAIWYDGNNKYYADAVKGRFTISRDSSKNTLYLQMNSLRAEDTAVYYCARDRTIFGVVLEYWGQGTLVTVSS

SEQ ID NO: 221 - protein, 120 aa, synthetic construct
QVQLVESGGGVVQPGRSLRLSCAASGFSFSSYGMHWVRQPPGKGLEWVAAIWYDANNKYYADSVKGRFTISRDSSKNTLYLQMNSLRAEDTAVYYCARDRTIFGVVLEYWGQGTLVTVSS

SEQ ID NO: 222 - protein, 120 aa, synthetic construct; identical to SEQ ID NO: 213

SEQ ID NO: 223 - protein, 120 aa, synthetic construct; identical to SEQ ID NO: 215

SEQ ID NO: 224 - protein, 120 aa, synthetic construct
QVQLVESGGGVVQPGRSLRLSCAASGFSFSSYGMHWVRQAPGKGLEWVAVIWYDASNKYYEDAVKGRFTISRDNSKNTLFLQVNSLRAEDTAVYYCARGITIFGHGFEYWGQGTLVTVSS

SEQ ID NO: 225 - protein, 120 aa, synthetic construct
QVQLVESGGGVVQPGRSLRLSCAASGFSFSSYGMHWVRQAPGKGLEWVAVIWYDGSNKYYEDSVKGRFTISRDNSKNTLFLQVNSLRAEDTAVYYCARGITIFGHGFEYWGQGTLVTVSS

SEQ ID NO: 226 - protein, 120 aa, synthetic construct
QVQLVESGGGVVQPGRSLRLSCAASGFSFSSYGMHWVRQAPGKGLEWVAVIWYDGSNKYYEDAVKGRFTISRDNSKNTLFLQVNSLRAEDTAVYYCARGITIFGHGFEYWGQGTLVTVSS

SEQ ID NO: 227 - protein, 120 aa, synthetic construct
QVQLVESGGGVVQPGRSLRLSCAASGFSFSSYGMHWVRQAPGKGLEWVAVIWYDASNKYYEDSVKGRFTISRDNSKNTLFLQVNSLRAEDTAVYYCARGITIFGHGFEYWGQGTLVTVSS

SEQ ID NO: 228 - protein, 120 aa, synthetic construct
QVQLVESGGGVVQPGRSLRLSCAASGFTFSNYGMHWVRQAPGEGLEWVAAIWFDASDKYYADAVKGRFTISRDNSKNTLYLQMNSLRAEDTAVYYCARDQAIFGVVPDYWGQGTLVTVSS

SEQ ID NO: 229 - protein, 120 aa, synthetic construct
QVQLVESGGGVVQPGRSLRLSCAASGFTFSNYGMHWVRQAPGEGLEWVAAIWFDASDKYYADSVKGRFTISRDNSKNTLYLQMNSLRAEDTAVYYCARDQAIFGVVPDYWGQGTLVTVSS

SEQ ID NO: 230 - protein, 120 aa, synthetic construct
QVQLVESGGGVVQPGRSLRLSCAASGFTFSNYGMHWVRQAPGEGLEWVAAIWFDGSDKYYADAVKGRFTISRDNSKNTLYLQMNSLRAEDTAVYYCARDQAIFGVVPDYWGQGTLVTVSS

SEQ ID NO: 231 - protein, 120 aa, synthetic construct; identical to SEQ ID NO: 228

SEQ ID NO: 232 - protein, 120 aa, synthetic construct
QVQLVESGGGVVQPGRSLRLSCAASGFTFSNYGMHWVRQAPGKGLEWVAAIWFDASDKYYADAVKGRFTISRDNSKNTLYLQMNSLRAEDTAVYYCARDQAIFGVVPDYWGQGTLVTVSS

SEQ ID NO: 233 - protein, 120 aa, synthetic construct; identical to SEQ ID NO: 232

SEQ ID NO: 234 - protein, 120 aa, synthetic construct; identical to SEQ ID NO: 228

SEQ ID NO: 235 - protein, 120 aa, synthetic construct; identical to SEQ ID NO: 232

SEQ ID NO: 236 - protein, 126 aa, synthetic construct
QVQLQESGPGLVKPSETLSLTCTVSGDSISSGGYYWSWIRQPPGKGLEWIGYIYYSGSTYYNPSLKSRVTISVDTSKNQFSLKLSSVTAADTAVYYCARDRITIFGVVMGGGMDVWGQGTTVTVSS

SEQ ID NO: 237 - protein, 126 aa, synthetic construct; identical to SEQ ID NO: 236

SEQ ID NO: 238 - protein, 126 aa, synthetic construct
QVQLQESGPGLVKPSQTLSLTCTVSGDSISSGGYYWSWIRQPPGKGLEWIGYIYYSGSTYYNPSLKSRVTISVDTSKNQFSLKLSSVTAADTAVYYCARDRITIFGVVMGGGMDVWGQGTTVTVSS

SEQ ID NO: 239 - protein, 126 aa, synthetic construct
QVQLQESGPGLVKPSETLSLTCTVSGDSISSGGYYWSWIRQHPGKGLEWIGYIYYSGSTYYNPSLKSRVTISVDTSKNQFSLKLSSVTAADTAVYYCARDRITIFGVVMGGGMDVWGQGTTVTVSS

SEQ ID NO: 240 - protein, 126 aa, synthetic construct; identical to SEQ ID NO: 166

SEQ ID NO: 241 - protein, 126 aa, synthetic construct; identical to SEQ ID NO: 239

SEQ ID NO: 242 - protein, 126 aa, synthetic construct; identical to SEQ ID NO: 238

SEQ ID NO: 243 - protein, 123 aa, synthetic construct
QVQLVQSGAEVKKPGASVKVSCKASGYTFTGYYIHWVRQAPGQGLEWMGWINPESGGTDYSQRFQGRVTMTRDTSISTAYMELNRLRSDDTAVYYCAREATIFGMVIVPFDYWGQGTLVTVSS

SEQ ID NO: 244 - protein, 123 aa, synthetic construct
QVPLVQSGAEVKKPGASVKVSCKASGYTFTGYYIHWVRQAPGQGLEWMGWINPESGGTDYSQRFQGRFTMTRDTSISTAYMELNRLRSDDTAVYYCAREATIFGMVIVPFDYWGQGTLVTVSS

SEQ ID NO: 245 - protein, 123 aa, synthetic construct
QVQLVQSGAEVKKPGASVKVSCKASGYTFTGYYIHWVRQAPGQGLEWMGWINPDAGGTDYSQRFQGRVTMTRDTSISTAYMELNRLRSDDTAVYYCAREATIFGMVIVPFDYWGQGTLVTVSS

SEQ ID NO: 246 - protein, 123 aa, synthetic construct
QVPLVQSGAEVKKPGASVKVSCKASGYTFTGYYIHWVRQAPGQGLEWMGWINPDAGGTDYSQRFQGRFTMTRDTSISTAYMELNRLRSDDTAVYYCAREATIFGMVIVPFDYWGQGTLVTVSS

SEQ ID NO: 247 - protein, 123 aa, synthetic construct
QVQLVQSGAEVKKPGASVKVSCKASGYTFTGYYIHWVRQAPGQGLEWMGWINPDSGGTDYSQRFQGRVTMTRDTSISTAYMELNRLRSDDTAVYYCAREATIFGMVIVPFDYWGQGTLVTVSS

SEQ ID NO: 248 - protein, 123 aa, synthetic construct
QVQLVQSGAEVKKPGASVKVSCKASGYTFTGYYIHWVRQAPGQGLEWMGWINPDSGGTDYSQRFQGRFTMTRDTSISTAYMELNRLRSDDTAVYYCAREATIFGMVIVPFDYWGQGTLVTVSS

SEQ ID NO: 249 - protein, 123 aa, synthetic construct
QVPLVQSGAEVKKPGASVKVSCKASGYTFTGYYIHWVRQAPGQGLEWMGWINPDSGGTDYSQRFQGRVTMTRDTSISTAYMELNRLRSDDTAVYYCAREATIFGMVIVPFDYWGQGTLVTVSS

SEQ ID NO: 250 - protein, 123 aa, synthetic construct
QVQLVQSGAEVKKPGASVKVSCKASGYTFTGYYIHWVRQAPGQGLEWMGWINPDAGGTDYSQRFQGRFTMTRDTSISTAYMELNRLRSDDTAVYYCAREATIFGMVIVPFDYWGQGTLVTVSS

SEQ ID NO: 251 - protein, 123 aa, synthetic construct
QVPLVQSGAEVKKPGASVKVSCKASGYTFTGYYIHWVRQAPGQGLEWMGWINPDAGGTDYSQRFQGRVTMTRDTSISTAYMELNRLRSDDTAVYYCAREATIFGMVIVPFDYWGQGTLVTVSS

SEQ ID NO: 252 - protein, 123 aa, synthetic construct
QVQLVQSGAEVKKPGASVKVSCKASGYTFTGYYIHWVRQAPGQGLEWMGWINPDAGGTDYSQRFQGRVTMTRDTSISTAYMELNSLRSDDTAVYYCAREATIFGMVIVPFDYWGQGTLVTVSS

SEQ ID NO: 253 - protein, 123 aa, synthetic construct
QVQLVQSGAEVKKPGASVKVSCKASGYTFTGYYIHWVRQAPGQGLEWMGWINPESGGTDYSQRFQGRVTMTRDTSISTAYMELNSLRSDDTAVYYCAREATIFGMVIVPFDYWGQGTLVTVSS

SEQ ID NO: 254 - protein, 123 aa, synthetic construct
QVPLVQSGAEVKKPGASVKVSCKASGYTFTGYYIHWVRQAPGQGLVWMGWISPNSGETSYAQKFQDRVTMTRDTSISTAYMELSRLRSDDTAVYFCAREATIFGMLIVPFDYWGQGTLVTVSS

SEQ ID NO: 255 - protein, 123 aa, synthetic construct
QVPLVQSGAEVKKPGASVKVSCKASGYTFTGYYIHWVRQAPGQGLVWMGWISPNSGDTSYAQKFQDRVTMTRDTSISTAYMELSRLRSDDTAVYFCAREATIFGMLIVPFDYWGQGTLVTVSS

SEQ ID NO: 256 - protein, 123 aa, synthetic construct; identical to SEQ ID NO: 254

SEQ ID NO: 257 - protein, 123 aa, synthetic construct
QVPLVQSGAEVKKPGASVKVSCKASGYTFTGYYIHWVRQAPGQGLVWMGWISPNSGETSYAQKFQDRVTMTRDTSISTAYMELSRLRSDDTAVYFCTREATIFGMLIVPFDYWGQGTLVTVSS

SEQ ID NO: 258 - protein, 123 aa, synthetic construct; identical to SEQ ID NO: 164

SEQ ID NO: 259 - protein, 123 aa, synthetic construct; identical to SEQ ID NO: 257

SEQ ID NO: 260 - protein, 123 aa, synthetic construct; identical to SEQ ID NO: 255

SEQ ID NO: 261 - protein, 123 aa, synthetic construct
QVQLVQSGAEVKKPGASVKVSCKASGYTFTGYYIHWVRQAPGQGLEWMGWISPNSGETSYAQKFQDRVTMTRDTSISTAYMELSSLRSDDTAVYFCAREATIFGMLIVPFDYWGQGTLVTVSS

SEQ ID NO: 262 - protein, 123 aa, synthetic construct
QVQLVQSGAEVKKPGASVKVSCKASGYTFTGYYIHWVRQAPGQGLEWMGWISPNSGETSYAQKFQDRVTMTRDTSISTAYMELSRLRSDDTAVYFCAREATIFGMLIVPFDYWGQGTLVTVSS

SEQ ID NO: 263 - protein, 123 aa, synthetic construct
QVPLVQSGAEVKKPGASVKVSCKASGYTFTGYYIHWVRQAPGQGLEWMGWINPESGGTDYSQRFQGRVTMTRDTSISTAYMELSRLRSDDTAVYYCAREATIFGMVIVPFDYWGQGTLVTVSS

SEQ ID NO: 264 - protein, 123 aa, synthetic construct
QVPLVQSGAEVKKPGASVKVSCKASGYTFTGYYIHWVRQAPGQGLEWMGWINPESGGTDYSQRFQGRFTMTRDTSISTAYMELSRLRSDDTAVYYCAREATIFGMVIVPFDYWGQGTLVTVSS

SEQ ID NO: 265 - protein, 123 aa, synthetic construct
QVPLVQSGAEVKKPGASVKVSCKASGYTFTGYYIHWVRQAPGQGLEWMGWINPDSGGTDYSQRFQGRVTMTRDTSISTAYMELSRLRSDDTAVYYCAREATIFGMVIVPFDYWGQGTLVTVSS

SEQ ID NO: 266 - protein, 123 aa, synthetic construct
QVQLVQSGAEVKKPGASVKVSCKASGYTFTGYYIHWVRQAPGQGLEWMGWINPESGGTDYSQRFQGRVTMTRDTSISTAYMELSSLRSDDTAVYYCAREATIFGMVIVPFDYWGQGTLVTVSS

SEQ ID NO: 267 - protein, 123 aa, synthetic construct; identical to SEQ ID NO: 263

SEQ ID NO: 268 - protein, 123 aa, synthetic construct
QVPLVQSGAEVKKPGASVKVSCKASGYTFTGYYIHWVRQAPGQGLEWMGWISPNQGETNYAQKFQDRVTMTRDTSISTAYMELSRLRSDDTAVYYCAREATIFGMLIVPFDYWGQGTLVTVSS

SEQ ID NO: 269 - protein, 123 aa, synthetic construct
QVPLVQSGAEVKKPGASVKVSCKASGYTFTGYYIHWVRQAPGQGLEWMGWISPNQGDTNYAQKFQDRVTMTRDTSISTAYMELSRLRSDDTAVYYCAREATIFGMLIVPFDYWGQGTLVTVSS

SEQ ID NO: 270 - protein, 123 aa, synthetic construct
QVPLVQSGAEVKKPGASVKVSCKASGYTFTGYYIHWVRQAPGQGLEWMGWISPNQGETNYAQKFQDRVTMTRDTSISTAYMELSRLRSDDTAVYYCTREATIFGMLIVPFDYWGQGTLVTVSS

SEQ ID NO: 271 - protein, 123 aa, synthetic construct
QVPLVQSGAEVKKPGASVKVSCKASGYTFTGYYIHWVRQAPGQGLEWMGWISPNNGETNYAQKFQDRVTMTRDTSISTAYMELSRLRSDDTAVYYCAREATIFGMLIVPFDYWGQGTLVTVSS

SEQ ID NO: 272 - protein, 123 aa, synthetic construct
QVPLVQSGAEVKKPGASVKVSCKASGYTFTGYYIHWVRQAPGQGLEWMGWISPNNGDTNYAQKFQDRVTMTRDTSISTAYMELSRLRSDDTAVYYCAREATIFGMLIVPFDYWGQGTLVTVSS

SEQ ID NO: 273 - protein, 123 aa, synthetic construct
QVPLVQSGAEVKKPGASVKVSCKASGYTFTGYYIHWVRQAPGQGLEWMGWISPNQGDTNYAQKFQDRVTMTRDTSISTAYMELSRLRSDDTAVYYCTREATIFGMLIVPFDYWGQGTLVTVSS

SEQ ID NO: 274 - protein, 123 aa, synthetic construct
QVPLVQSGAEVKKPGASVKVSCKASGYTFTGYYIHWVRQAPGQGLEWMGWISPNNGETNYAQKFQDRVTMTRDTSISTAYMELSRLRSDDTAVYYCTREATIFGMLIVPFDYWGQGTLVTVSS

SEQ ID NO: 275 - protein, 123 aa, synthetic construct; identical to SEQ ID NO: 268

SEQ ID NO: 276 - protein, 123 aa, synthetic construct; identical to SEQ ID NO: 272

SEQ ID NO: 277 - protein, 123 aa, synthetic construct; identical to SEQ ID NO: 269

SEQ ID NO: 278 - protein, 123 aa, synthetic construct; identical to SEQ ID NO: 271

SEQ ID NO: 279 - protein, 123 aa, synthetic construct
QVQLVQSGAEVKKPGASVKVSCKASGYTFTGYYIHWVRQAPGQGLEWMGWISPNQGETNYAQKFQDRVTMTRDTSISTAYMELSSLRSDDTAVYYCAREATIFGMLIVPFDYWGQGTLVTVSS

SEQ ID NO: 280 - protein, 123 aa, synthetic construct; identical to SEQ ID NO: 279

SEQ ID NO: 281 - protein, 128 aa, synthetic construct; identical to SEQ ID NO: 158

SEQ ID NO: 282 - protein, 128 aa, synthetic construct; identical to SEQ ID NO: 158

SEQ ID NO: 283 - protein, 128 aa, synthetic construct; identical to SEQ ID NO: 158

SEQ ID NO: 284 - protein, 128 aa, synthetic construct; identical to SEQ ID NO: 158

SEQ ID NO: 285 - protein, 128 aa, synthetic construct; identical to SEQ ID NO: 158

SEQ ID NO: 286 - protein, 128 aa, synthetic construct; identical to SEQ ID NO: 158

SEQ ID NO: 287 - protein, 128 aa, synthetic construct; identical to SEQ ID NO: 158

SEQ ID NO: 288 - protein, 128 aa, synthetic construct; identical to SEQ ID NO: 158

SEQ ID NO: 289 - protein, 128 aa, synthetic construct; identical to SEQ ID NO: 158

SEQ ID NO: 290 - protein, 128 aa, synthetic construct; identical to SEQ ID NO: 158

SEQ ID NO: 291 - protein, 128 aa, synthetic construct; identical to SEQ ID NO: 158

SEQ ID NO: 292 - protein, 128 aa, synthetic construct; identical to SEQ ID NO: 158

SEQ ID NO: 293 - protein, 128 aa, synthetic construct
QMQVVQSGAEVKKPGASVKVSCKASGYTFTGYYMHWVRQAPGQGLEWMGWINPNSGGTNYAQKFQGRVTMTRDTSISTAYMELSSLRSDDTAVYYCARGGDYVFGTYRPHYYYGMDVWGQGTTVTVSS

SEQ ID NO: 294 - protein, 128 aa, synthetic construct
QMQVVQSGAEVKKPGASVKVSCKASGYTFTGYYMHWVRQAPGQGLEWMGWINPNSGGTNYAQKFQGRVTMTRDTSISTAYMELSRLRSDDTAVYYCARGGDYVFGTYRPHYYYGMDVWGQGTTVTVSS

SEQ ID NO: 295 - protein, 121 aa, synthetic construct; identical to SEQ ID NO: 195

SEQ ID NO: 296 - protein, 121 aa, synthetic construct; identical to SEQ ID NO: 177

SEQ ID NO: 297 - protein, 128 aa, synthetic construct; identical to SEQ ID NO: 158

SEQ ID NO: 298 - protein, 121 aa, synthetic construct
QVQLVESGGGVVQPGRSLRLSCTASGFTFSSYGIHWVRQAPGKGLEWVAVIWYDGSNKFHADSVKGRFTISRDNSKNTLYLQMNSLRAEDSAMYFCARGKVAGMPEAFEIWGQGTKVTVSS

SEQ ID NO: 299 - protein, 129 aa, synthetic construct
QMQLVQSGAEVKKPGASVKVSCKASGYTFTSYDINWVRQATGQGLEWMGWMNPNSGNTGYAQKFQGRVTMTRDTSISTAYMELSSLRSQDTAVYYCARGGDYVWGSYRPYYYYYGMDVWGQGTTVTVSS

SEQ ID NO: 300 - protein, 121 aa, synthetic construct
QVQLVESGGGVVQPGRSLRLSCAASGFTFSSYGIHWVRQAPGKGLEWVAVIWYDASNKFHADAVKGRFTISRDNSKNTLYLQMNSLRAEDSAMYFCARGKVAGMPEAFEIWGQGTKVTVSS

SEQ ID NO: 301 - protein, 121 aa, synthetic construct
QVQLVESGGGVVQPGRSLRLSCTASGFTFSSYGIHWVRQAPGKGLEWVAVIWYDASNKFHADAVKGRFTISRDNSKNTLYLQMNSLRAEDSAMYFCARGKVAGMPEAFEIWGQGTKVTVSS

SEQ ID NO: 302 - protein, 121 aa, synthetic construct; identical to SEQ ID NO: 300

SEQ ID NO: 303 - protein, 121 aa, synthetic construct
QVQLVESGGGVVQPGRSLRLSCAASGFTFSSYGIHWVRQAPGKGLEWVAVIWYDASNKFHADAVKGRFTISRDNSKNTLYLQMNSLRAEDSAMYFCARGKVAGMPEAFEIWGQGTLVTVSS

SEQ ID NO: 304 - protein, 121 aa, synthetic construct
QVQLVESGGGVVQPGRSLRLSCAASGFTFSSYGIHWVRQAPGKGLEWVAVIWYDASNKFHADSVKGRFTISRDNSKNTLYLQMNSLRAEDSAMYFCARGKVAGMPEAFEIWGQGTKVTVSS

SEQ ID NO: 305 - protein, 121 aa, synthetic construct
QVQLVESGGGVVQPGRSLRLSCAASGFTFSSYGIHWVRQAPGKGLEWVAVIWYDGSNKFHADAVKGRFTISRDNSKNTLYLQMNSLRAEDSAMYFCARGKVAGMPEAFEIWGQGTKVTVSS

SEQ ID NO: 306 - protein, 129 aa, synthetic construct
QMQLVQSGAEVKKPGASVKVSCKASGYTFTSYDINWVRQATGQGLEWMGWMNPNSGGTGYAQKFQGRVTMTRDTSISTAYMELSSLRSQDTAVYYCARGGDYVWGSYRPYYYYYGMDVWGQGTTVTVSS

SEQ ID NO: 307 - protein, 129 aa, synthetic construct; identical to SEQ ID NO: 299

SEQ ID NO: 308 - protein, 129 aa, synthetic construct; identical to SEQ ID NO: 306

SEQ ID NO: 309 - protein, 129 aa, synthetic construct
QMQLVQSGAEVKKPGASVKVSCKASGYTFTSYDINWVRQAPGQGLEWMGWMNPNSGGTGYAQKFQGRVTMTRDTSISTAYMELSSLRSDDTAVYYCARGGDYVWGSYRPYYYYYGMDVWGQGTTVTVSS

SEQ ID NO: 310 - protein, 129 aa, synthetic construct; identical to SEQ ID NO: 306

SEQ ID NO: 311 - protein, 129 aa, synthetic construct
QMQLVQSGAEVKKPGASVKVSCKASGYTFTSYDINWVRQAPGQGLEWMGWMNPNSGNTGYAQKFQGRVTMTRDTSISTAYMELSSLRSDDTAVYYCARGGDYVWGSYRPYYYYYGMDVWGQGTTVTVSS

SEQ ID NO: 312 - protein, 129 aa, synthetic construct
QMQLVQSGAEVKKPGASVKVSCKASGYTFTSYDINWVRQATGQGLEWMGWMNPNSGGTGYAQKFQGRVTMTRDTSISTAYMELSSLRSQDTAVYYCARGGDYVFGSYRPYYYYYGMDVWGQGTTVTVSS

SEQ ID NO: 313 - protein, 129 aa, synthetic construct
QMQLVQSGAEVKKPGASVKVSCKASGYTFTSYDINWVRQAPGQGLEWMGWMNPNSGGTGYAQKFQGRVTMTRDTSISTAYMELSSLRSDDTAVYYCARGGDYVFGSYRPYYYYYGMDVWGQGTTVTVSS

SEQ ID NO: 314 - protein, 121 aa, synthetic construct; identical to SEQ ID NO: 303

SEQ ID NO: 315 - protein, 216 aa, synthetic construct
QSVLTQPPSASGTPGQRVTISCSGSSSNIGSNTVNWYQHLPGTAPKLLIYTNNQRPSGVPDRFSGSKSGTSASLAISGLQSEDEADYFCATFDDSLNGPVFGGGTKLTVLGQPKAAPSVTLFPPSSEELQANKATLVCLISDFYPGAVTVAWKADSSPVKAGVETTTPSKQSNNKYAASSYLSLTPEQWKSHRSYSCQVTHEGSTVEKTVAPTECS

SEQ ID NO: 316 - protein, 214 aa, synthetic construct
DIQMTQSPSSLSASIGDRVTITCRASQDIRDYLGWYQQKPGKAPKRLIYGASSLQSGVPSRFSGSGSGTEFTLTISSLQPEDFATYYCLQHNNYPFTFGPGTKVDIKRTVAAPSVFIFPPSDEQLKSGTASVVCLLNNFYPREAKVQWKVDNALQSGNSQESVTEQDSKDSTYSLSSTLTLSKADYEKHKVYACEVTHQGLSSPVTKSFNRGEC

SEQ ID NO: 317 - protein, 214 aa, synthetic construct; identical to SEQ ID NO: 316

SEQ ID NO: 318 - protein, 213 aa, synthetic construct
DIQMTQSPSSLSASVGDRVTITCQASQDISNYLNWYQQKPGKAPKLLIYDASNLETGVPSRFSGSGSGTDFSFTISSLQPEDIATYYCQQYDILLTFGGGTKVEIKRTVAAPSVFIFPPSDEQLKSGTASVVCLLNNFYPREAKVQWKVDNALQSGNSQESVTEQDSKDSTYSLSSTLTLSKADYEKHKVYACEVTHQGLSSPVTKSFNRGEC

SEQ ID NO: 319 - protein, 220 aa, synthetic construct
DIVMTQSPDSLAVSLGERATINCKSSQSVLSSSNNKNYIAWYQQQPGHPPKLLIYWASTRESGVPDRFSGSGSGTDFTLTISSLQAEDVAVFYCQQYYSTPWTFGQGTKVEIKRTVAAPSVFIFPPSDEQLKSGTASVVCLLNNFYPREAKVQWKVDNALQSGNSQESVTEQDSKDSTYSLSSTLTLSKADYEKHKVYACEVTHQGLSSPVTKSFNRGEC

SEQ ID NO: 320 - protein, 220 aa, synthetic construct
DIVMTQSPDSLAVSLGERATINCKSSQSVLSSSNNKNYIAWYQQKPGHPPKLLIYWASTRESGVPDRFSGSGSGTDFTLTISSLQAEDVAVFYCQQYYSTPWTFGQGTKVEIKRTVAAPSVFIFPPSDEQLKSGTASVVCLLNNFYPREAKVQWKVDNALQSGNSQESVTEQDSKDSTYSLSSTLTLSKADYEKHKVYACEVTHQGLSSPVTKSFNRGEC

SEQ ID NO: 321 - protein, 220 aa, synthetic construct
DIVMTQSPDSLSVSLGERATINCKSSQSVLSSSNNKNYLAWYQQKPGQPPNLLIYWTSTRDSGVPDRFSGSGSGTDFTLTINSLQAEDVAVYYCQQYYRTPWTFGQGTKVEIKRTVAAPSVFIFPPSDEQLKSGTASVVCLLNNFYPREAKVQWKVDNALQSGNSQESVTEQDSKDSTYSLSSTLTLSKADYEKHKVYACEVTHQGLSSPVTKSFNRGEC

SEQ ID NO: 322 - protein, 220 aa, synthetic construct; identical to SEQ ID NO: 321

SEQ ID NO: 323 - protein, 215 aa, synthetic construct
EIVLTQSPGTLSLSPGERATLSCRASQSISYSYLAWYQQKPGQAPRLLIYGASSRATGIPDRFSGSGSGTDFTLTISRQEPDDFAVYYCQQYGSSPLTFGGGTKVEIKRTVAAPSVFIFPPSDEQLKSGTASVVCLLNNFYPREAKVQWKVDNALQSGNSQESVTEQDSKDSTYSLSSTLTLSKADYEKHKVYACEVTHQGLSSPVTKSFNRGEC

SEQ ID NO: 324 - protein, 214 aa, synthetic construct
EIVMTQSPATLSVSPGERATLSCRASQSVSSNLAWYQQKPGQAPRLLIYGAATRATGIPARVSGSGSGTEFTLTISSLQSEDFAVYYCQQYNNWPLTFGGGTKVEIKRTVAAPSVFIFPPSDEQLKSGTASVVCLLNNFYPREAKVQWKVDNALQSGNSQESVTEQDSKDSTYSLSSTLTLSKADYEKHKVYACEVTHQGLSSPVTKSFNRGEC

SEQ ID NO: 325 - protein, 214 aa, synthetic construct
DIQMTQSPSSLSASVGDRVTITCRASQGIRNELGWYQQKPGKAPKRLIYGASSLQSGVPSRFSGSGSGTEFTLTISSLQPEDFVTYYCLQHNSYPFTFGPGTKVDVKRTVAAPSVFIFPPSDEQLKSGTASVVCLLNNFYPREAKVQWKVDNALQSGNSQESVTEQDSKDSTYSLSSTLTLSKADYEKHKVYACEVTHQGLSSPVTKSFNRGEC

SEQ ID NO: 326 - protein, 213 aa, synthetic construct
DIQMTQSPSSLSASVGDRVTITCQASQDITNYLNWYQQKPGKAPKLLIYDASNLEPGVPSRFSGSGSGTDFTFTISSLQPEDIATYYCQQYDDLFTFGPGTKVDIKRTVAAPSVFIFPPSDEQLKSGTASVVCLLNNFYPREAKVQWKVDNALQSGNSQESVTEQDSKDSTYSLSSTLTLSKADYEKHKVYACEVTHQGLSSPVTKSFNRGEC

SEQ ID NO: 327 - protein, 214 aa, synthetic construct
DIQMTQSPSSVSASVGDRVTITCRASQGLIIWLAWYQQKPGKAPKLLIYAASSLQSGVPSRFSGSGSGTDFTLTISSLQPEDFATYYCQQTNSFPPTFGQGTKVEIKRTVAAPSVFIFPPSDEQLKSGTASVVCLLNNFYPREAKVQWKVDNALQSGNSQESVTEQDSKDSTYSLSSTLTLSKADYEKHKVYACEVTHQGLSSPVTKSFNRGEC

SEQ ID NO: 328 - protein, 214 aa, synthetic construct; identical to SEQ ID NO: 327

SEQ ID NO: 329 - protein, 214 aa, synthetic construct
DIQMTQSPSSLSASVGDRVTITCRASQGIRNELGWYQQKPGKAPKLLIYGASSLQSGVPSRFSGSGSGTEFTLTISSLQPEDFVTYYCLQHNSYPFTFGQGTKVDVKRTVAAPSVFIFPPSDEQLKSGTASVVCLLNNFYPREAKVQWKVDNALQSGNSQESVTEQDSKDSTYSLSSTLTLSKADYEKHKVYACEVTHQGLSSPVTKSFNRGEC

SEQ ID NO: 330 - protein, 214 aa, synthetic construct; identical to SEQ ID NO: 329

SEQ ID NO: 331 - protein, 214 aa, synthetic construct; identical to SEQ ID NO: 329

SEQ ID NO: 332 - protein, 214 aa, synthetic construct
DIQMTQSPSSLSASVGDRVTITCRASQGIRNELGWYQQKPGKAPKLLIYGASSLQSGVPSRFSGSGSGTEFTLTISSLQPEDFVTYYCLQHNSYPFTFGPGTKVDVKRTVAAPSVFIFPPSDEQLKSGTASVVCLLNNFYPREAKVQWKVDNALQSGNSQESVTEQDSKDSTYSLSSTLTLSKADYEKHKVYACEVTHQGLSSPVTKSFNRGEC

SEQ ID NO: 333 - protein, 214 aa, synthetic construct
DIQMTQSPSSLSASVGDRVTITCRASQGIRNELGWYQQKPGKAPKRLIYGASSLQSGVPSRFSGSGSGTEFTLTISSLQPEDFVTYYCLQHNSYPFTFGQGTKVDVKRTVAAPSVFIFPPSDEQLKSGTASVVCLLNNFYPREAKVQWKVDNALQSGNSQESVTEQDSKDSTYSLSSTLTLSKADYEKHKVYACEVTHQGLSSPVTKSFNRGEC

SEQ ID NO: 334 - protein, 214 aa, synthetic construct; identical to SEQ ID NO: 329

SEQ ID NO: 335 - protein, 214 aa, synthetic construct
DIQMTQSPSSLSASIGDRVTITCRASQDIRDYLGWYQQKPGKAPKLLIYGASSLQSGVPSRFSGSGSGTEFTLTISSLQPEDFATYYCLQHNNYPFTFGQGTKVDIKRTVAAPSVFIFPPSDEQLKSGTASVVCLLNNFYPREAKVQWKVDNALQSGNSQESVTEQDSKDSTYSLSSTLTLSKADYEKHKVYACEVTHQGLSSPVTKSFNRGEC

SEQ ID NO: 336 - protein, 214 aa, synthetic construct
DIQMTQSPSSLSASIGDRVTITCRASQDIRDYLGWYQQKPGKAPKRLIYGASSLQSGVPSRFSGSGSGTEFTLTISSLQPEDFATYYCLQHNNYPFTFGQGTKVDIKRTVAAPSVFIFPPSDEQLKSGTASVVCLLNNFYPREAKVQWKVDNALQSGNSQESVTEQDSKDSTYSLSSTLTLSKADYEKHKVYACEVTHQGLSSPVTKSFNRGEC

SEQ ID NO: 337 - protein, 214 aa, synthetic construct
DIQMTQSPSSLSASIGDRVTITCRASQDIRDYLGWYQQKPGKAPKLLIYGASSLQSGVPSRFSGSGSGTEFTLTISSLQPEDFATYYCLQHNNYPFTFGPGTKVDIKRTVAAPSVFIFPPSDEQLKSGTASVVCLLNNFYPREAKVQWKVDNALQSGNSQESVTEQDSKDSTYSLSSTLTLSKADYEKHKVYACEVTHQGLSSPVTKSFNRGEC

SEQ ID NO: 338 - protein, 214 aa, synthetic construct; identical to SEQ ID NO: 335

SEQ ID NO: 339 - protein, 214 aa, synthetic construct; identical to SEQ ID NO: 335

SEQ ID NO: 340 - protein, 214 aa, synthetic construct; identical to SEQ ID NO: 335

SEQ ID NO: 341 - protein, 214 aa, synthetic construct; identical to SEQ ID NO: 335

SEQ ID NO: 342 - protein, 214 aa, synthetic construct
DIQMTQSPSSLSASIGDRVTITCRASQDLRNYLGWYHQKPGKAPKRLIYGASSLQSGVPSRFSGSGSGTEFTLTISSLQPEDFATYYCLQHNNYPFTFGPGTKVDIKRTVAAPSVFIFPPSDEQLKSGTASVVCLLNNFYPREAKVQWKVDNALQSGNSQESVTEQDSKDSTYSLSSTLTLSKADYEKHKVYACEVTHQGLSSPVTKSFNRGEC

SEQ ID NO: 343 - protein, 214 aa, synthetic construct
DIQMTQSPSSLSASIGDRVTITCRASQDLRNYLGWYQQKPGKAPKLLIYGASSLQSGVPSRFSGSGSGTEFTLTISSLQPEDFATYYCLQHNNYPFTFGPGTKVDIKRTVAAPSVFIFPPSDEQLKSGTASVVCLLNNFYPREAKVQWKVDNALQSGNSQESVTEQDSKDSTYSLSSTLTLSKADYEKHKVYACEVTHQGLSSPVTKSFNRGEC

SEQ ID NO: 344 - protein, 214 aa, synthetic construct; identical to SEQ ID NO: 343

SEQ ID NO: 345 - protein, 214 aa, synthetic construct
DIQMTQSPSSLSASIGDRVTITCRASQDLRNYLGWYHQKPGKAPKLLIYGASSLQSGVPSRFSGSGSGTEFTLTISSLQPEDFATYYCLQHNNYPFTFGPGTKVDIKRTVAAPSVFIFPPSDEQLKSGTASVVCLLNNFYPREAKVQWKVDNALQSGNSQESVTEQDSKDSTYSLSSTLTLSKADYEKHKVYACEVTHQGLSSPVTKSFNRGEC

SEQ ID NO: 346 - protein, 214 aa, synthetic construct
DIQMTQSPSSLSASIGDRVTITCRASQDLRNYLGWYQQKPGKAPKRLIYGASSLQSGVPSRFSGSGSGTEFTLTISSLQPEDFATYYCLQHNNYPFTFGPGTKVDIKRTVAAPSVFIFPPSDEQLKSGTASVVCLLNNFYPREAKVQWKVDNALQSGNSQESVTEQDSKDSTYSLSSTLTLSKADYEKHKVYACEVTHQGLSSPVTKSFNRGEC

SEQ ID NO: 347 - protein, 214 aa, synthetic construct; identical to SEQ ID NO: 346

SEQ ID NO: 348 - protein, 214 aa, synthetic construct; identical to SEQ ID NO: 345

SEQ ID NO: 349 - protein, 214 aa, synthetic construct; identical to SEQ ID NO: 342

SEQ ID NO: 350 - protein, 214 aa, synthetic construct; identical to SEQ ID NO: 343

SEQ ID NO: 351 - protein, 214 aa, synthetic construct; identical to SEQ ID NO: 343

SEQ ID NO: 352 - protein, 214 aa, synthetic construct
DIQMTQSPSSLSASIGDRVTITCRASQDLRNYLGWYQQKPGKAPKLLIYGASSLQSGVPSRFSGSGSGTEFTLTISSLQPEDFATYYCLQHNNYPFTFGQGTKVDIKRTVAAPSVFIFPPSDEQLKSGTASVVCLLNNFYPREAKVQWKVDNALQSGNSQESVTEQDSKDSTYSLSSTLTLSKADYEKHKVYACEVTHQGLSSPVTKSFNRGEC

SEQ ID NO: 353 - protein, 214 aa, synthetic construct; identical to SEQ ID NO: 343

SEQ ID NO: 354 - protein, 213 aa, synthetic construct
DIQMTQSPSSLSASVGDRVTITCQASQDISNYLNWYQQKPGKAPKLLIYDASNLETGVPSRFSGSGSGTDFSLTISSLQPEDFATYYCQQYDILLTFGGGTKVEIKRTVAAPSVFIFPPSDEQLKSGTASVVCLLNNFYPREAKVQWKVDNALQSGNSQESVTEQDSKDSTYSLSSTLTLSKADYEKHKVYACEVTHQGLSSPVTKSFNRGEC

SEQ ID NO: 355 - protein, 213 aa, synthetic construct; identical to SEQ ID NO: 354

SEQ ID NO: 356 - protein, 213 aa, synthetic construct
DIQMTQSPSSLSASVGDRVTITCQASQDISNYLNWYQQKPGKAPKLLIYDASNLETGVPSRFSGSGSGTDFSLTISSLQPEDIATYYCQQYDILLTFGGGTKVEIKRTVAAPSVFIFPPSDEQLKSGTASVVCLLNNFYPREAKVQWKVDNALQSGNSQESVTEQDSKDSTYSLSSTLTLSKADYEKHKVYACEVTHQGLSSPVTKSFNRGEC

SEQ ID NO: 357 - protein, 213 aa, synthetic construct
DIQMTQSPSSLSASVGDRVTITCQASQDISNYLNWYQQKPGKAPKLLIYDASNLETGVPSRFSGSGSGTDFSFTISSLQPEDFATYYCQQYDILLTFGGGTKVEIKRTVAAPSVFIFPPSDEQLKSGTASVVCLLNNFYPREAKVQWKVDNALQSGNSQESVTEQDSKDSTYSLSSTLTLSKADYEKHKVYACEVTHQGLSSPVTKSFNRGEC

SEQ ID NO: 358 - protein, 213 aa, synthetic construct; identical to SEQ ID NO: 356

SEQ ID NO: 359 - protein, 213 aa, synthetic construct; identical to SEQ ID NO: 357

SEQ ID NO: 360 - protein, 213 aa, synthetic construct; identical to SEQ ID NO: 318

SEQ ID NO: 361 - protein, 213 aa, synthetic construct; identical to SEQ ID NO: 354

SEQ ID NO: 362 - protein, 213 aa, synthetic construct; identical to SEQ ID NO: 354

SEQ ID NO: 363 - protein, 214 aa, synthetic construct; identical to SEQ ID NO: 316

SEQ ID NO: 364 - protein, 214 aa, synthetic construct; identical to SEQ ID NO: 316

SEQ ID NO: 365 - protein, 214 aa, synthetic construct; identical to SEQ ID NO: 335

SEQ ID NO: 366 - protein, 214 aa, synthetic construct; identical to SEQ ID NO: 335

SEQ ID NO: 367 - protein, 214 aa, synthetic construct; identical to SEQ ID NO: 337

SEQ ID NO: 368 - protein, 214 aa, synthetic construct; identical to SEQ ID NO: 337

SEQ ID NO: 369 - protein, 214 aa, synthetic construct; identical to SEQ ID NO: 337

SEQ ID NO: 370 - protein, 213 aa, synthetic construct
DIQMTQSPSSLSASVGDRVTITCQASQDITNYLNWYQQKPGKAPKLLIYDASNLEPGVPSRFSGSGSGTDFTLTISSLQPEDFATYYCQQYDDLFTFGPGTKVDIKRTVAAPSVFIFPPSDEQLKSGTASVVCLLNNFYPREAKVQWKVDNALQSGNSQESVTEQDSKDSTYSLSSTLTLSKADYEKHKVYACEVTHQGLSSPVTKSFNRGEC

SEQ ID NO: 371 - protein, 213 aa, synthetic construct
DIQMTQSPSSLSASVGDRVTITCQASQDITNYLNWYQQKPGKAPKLLIYDASNLEPGVPSRFSGSGSGTDFTLTISSLQPEDIATYYCQQYDDLFTFGPGTKVDIKRTVAAPSVFIFPPSDEQLKSGTASVVCLLNNFYPREAKVQWKVDNALQSGNSQESVTEQDSKDSTYSLSSTLTLSKADYEKHKVYACEVTHQGLSSPVTKSFNRGEC

SEQ ID NO: 372 - protein, 213 aa, synthetic construct; identical to SEQ ID NO: 370

SEQ ID NO: 373 - protein, 213 aa, synthetic construct
DIQMTQSPSSLSASVGDRVTITCQASQDITNYLNWYQQKPGKAPKLLIYDASNLEPGVPSRFSGSGSGTDFTFTISSLQPEDFATYYCQQYDDLFTFGPGTKVDIKRTVAAPSVFIFPPSDEQLKSGTASVVCLLNNFYPREAKVQWKVDNALQSGNSQESVTEQDSKDSTYSLSSTLTLSKADYEKHKVYACEVTHQGLSSPVTKSFNRGEC

SEQ ID NO: 374 - protein, 213 aa, synthetic construct; identical to SEQ ID NO: 371

SEQ ID NO: 375 - protein, 213 aa, synthetic construct; identical to SEQ ID NO: 373

SEQ ID NO: 376 - protein, 213 aa, synthetic construct; identical to SEQ ID NO: 326

SEQ ID NO: 377 - protein, 213 aa, synthetic construct; identical to SEQ ID NO: 370

SEQ ID NO: 378 - protein, 213 aa, synthetic construct; identical to SEQ ID NO: 370

SEQ ID NO: 379 - protein, 213 aa, synthetic construct
DIQMTQSPSSLSASVGDRVTITCQASQDITNYLNWYQQKPGKAPKLLIYDASNLEPGVPSRFSGSGSGTDFTLTISSLQPEDFATYYCQQYDDLFTFGQGTKVDIKRTVAAPSVFIFPPSDEQLKSGTASVVCLLNNFYPREAKVQWKVDNALQSGNSQESVTEQDSKDSTYSLSSTLTLSKADYEKHKVYACEVTHQGLSSPVTKSFNRGEC

SEQ ID NO: 380 - protein, 213 aa, synthetic construct; identical to SEQ ID NO: 379

SEQ ID NO: 381 - protein, 214 aa, synthetic construct
EIVLTQSPGTLSLSPGERATLSCRASQIFTSTYLAWYQQKPGQAPRLLIYGASSRATGIPDRFSGSGSGTDFTLTISRLEPEDFAVYYCQQYGSSPRFGQGTRLEIKRTVAAPSVFIFPPSDEQLKSGTASVVCLLNNFYPREAKVQWKVDNALQSGNSQESVTEQDSKDSTYSLSSTLTLSKADYEKHKVYACEVTHQGLSSPVTKSFNRGEC

SEQ ID NO: 382 - protein, 214 aa, synthetic construct; identical to SEQ ID NO: 381

SEQ ID NO: 383 - protein, 214 aa, synthetic construct; identical to SEQ ID NO: 381

SEQ ID NO: 384 - protein, 214 aa, synthetic construct; identical to SEQ ID NO: 381

SEQ ID NO: 385 - protein, 214 aa, synthetic construct
EIVMTQSPATLSVSPGERATLSCRASQSVSSNLAWYQQKPGQAPRLLIYGAATRATGIPARFSGSGSGTEFTLTISSLQSEDFAVYYCQQYNNWPLTFGGGTKVEIKRTVAAPSVFIFPPSDEQLKSGTASVVCLLNNFYPREAKVQWKVDNALQSGNSQESVTEQDSKDSTYSLSSTLTLSKADYEKHKVYACEVTHQGLSSPVTKSFNRGEC

SEQ ID NO: 386 - protein, 214 aa, synthetic construct; identical to SEQ ID NO: 385

SEQ ID NO: 387 - protein, 214 aa, synthetic construct; identical to SEQ ID NO: 385

SEQ ID NO: 388 - protein, 214 aa, synthetic construct; identical to SEQ ID NO: 324

SEQ ID NO: 389 - protein, 214 aa, synthetic construct
EIVMTQSPATLSVSPGERATLSCRASQSVSSNLAWYQQKPGQAPRLLIYGAATRATGIPARFSGSGSGTEFTLTISSLEPEDFAVYYCQQYNNFPLTFGGGTKVEIKRTVAAPSVFIFPPSDEQLKSGTASVVCLLNNFYPREAKVQWKVDNALQSGNSQESVTEQDSKDSTYSLSSTLTLSKADYEKHKVYACEVTHQGLSSPVTKSFNRGEC

SEQ ID NO: 390 - protein, 214 aa, synthetic construct
EIVMTQSPATLSVSPGERATLSCRASQSVSSNLAWYQQKPGQAPRLLIYGAATRATGIPARFSGSGSGTEFTLTISSLEPEDFAVYYCQQYNNYPLTFGGGTKVEIKRTVAAPSVFIFPPSDEQLKSGTASVVCLLNNFYPREAKVQWKVDNALQSGNSQESVTEQDSKDSTYSLSSTLTLSKADYEKHKVYACEVTHQGLSSPVTKSFNRGEC

SEQ ID NO: 391 - protein, 214 aa, synthetic construct
EIVMTQSPATLSVSPGERATLSCRASQSVSSNLAWYQQKPGQAPRLLIYGAATRATGIPARFSGSGSGTEFTLTISSLEPEDFAVYYCQQYNNWPLTFGGGTKVEIKRTVAAPSVFIFPPSDEQLKSGTASVVCLLNNFYPREAKVQWKVDNALQSGNSQESVTEQDSKDSTYSLSSTLTLSKADYEKHKVYACEVTHQGLSSPVTKSFNRGEC

SEQ ID NO: 392 - protein, 214 aa, synthetic construct; identical to SEQ ID NO: 391

SEQ ID NO: 393 - protein, 215 aa, synthetic construct
EIVLTQSPGTLSLSPGERATLSCRASQSISYSYLAWYQQKPGQAPRLLIYGASSRATGIPDRFSGSGSGTDFTLTISRLEPDDFAVYYCQQYGSSPLTFGGGTKVEIKRTVAAPSVFIFPPSDEQLKSGTASVVCLLNNFYPREAKVQWKVDNALQSGNSQESVTEQDSKDSTYSLSSTLTLSKADYEKHKVYACEVTHQGLSSPVTKSFNRGEC

SEQ ID NO: 394 - protein, 215 aa, synthetic construct; identical to SEQ ID NO: 323

SEQ ID NO: 395 - protein, 215 aa, synthetic construct; identical to SEQ ID NO: 393

SEQ ID NO: 396 - protein, 215 aa, synthetic construct; identical to SEQ ID NO: 393

SEQ ID NO: 397 - protein, 215 aa, synthetic construct; identical to SEQ ID NO: 393

SEQ ID NO: 398 - protein, 215 aa, synthetic construct; identical to SEQ ID NO: 323

SEQ ID NO: 399 - protein, 215 aa, synthetic construct; identical to SEQ ID NO: 323

SEQ ID NO: 400 - protein, 220 aa, synthetic construct; identical to SEQ ID NO: 319

SEQ ID NO: 401 - protein, 220 aa, synthetic construct; identical to SEQ ID NO: 319

SEQ ID NO: 402 - protein, 220 aa, synthetic construct; identical to SEQ ID NO: 319

SEQ ID NO: 403 - protein, 220 aa, synthetic construct; identical to SEQ ID NO: 319

SEQ ID NO: 404 - protein, 220 aa, synthetic construct; identical to SEQ ID NO: 319

SEQ ID NO: 405 - protein, 220 aa, synthetic construct; identical to SEQ ID NO: 319

SEQ ID NO: 406 - protein, 220 aa, synthetic construct; identical to SEQ ID NO: 319

SEQ ID NO: 407 - protein, 220 aa, synthetic construct; identical to SEQ ID NO: 319

SEQ ID NO: 408 - protein, 220 aa, synthetic construct; identical to SEQ ID NO: 319

SEQ ID NO: 409 - protein, 220 aa, synthetic construct
DIVMTQSPDSLAVSLGERATINCKSSQSVLSSSNNKNYIAWYQQKPGQPPKLLIYWASTRESGVPDRFSGSGSGTDFTLTISSLQAEDVAVFYCQQYYSTPWTFGQGTKVEIKRTVAAPSVFIFPPSDEQLKSGTASVVCLLNNFYPREAKVQWKVDNALQSGNSQESVTEQDSKDSTYSLSSTLTLSKADYEKHKVYACEVTHQGLSSPVTKSFNRGEC

SEQ ID NO: 410 - protein, 220 aa, synthetic construct; identical to SEQ ID NO: 409

SEQ ID NO: 411 - protein, 220 aa, synthetic construct
DIVMTQSPDSLSVSLGERATINCKSSQSVLSSSNNKNYLAWYQQKPGQPPNLLIYWTSTRESGVPDRFSGSGSGTDFTLTINSLQAEDVAVYYCQQYYRTPWTFGQGTKVEIKRTVAAPSVFIFPPSDEQLKSGTASVVCLLNNFYPREAKVQWKVDNALQSGNSQESVTEQDSKDSTYSLSSTLTLSKADYEKHKVYACEVTHQGLSSPVTKSFNRGEC

SEQ ID NO: 412 - protein, 220 aa, synthetic construct; identical to SEQ ID NO: 411

SEQ ID NO: 413 - protein, 220 aa, synthetic construct; identical to SEQ ID NO: 321

SEQ ID NO: 414 - protein, 220 aa, synthetic construct; identical to SEQ ID NO: 411

SEQ ID NO: 415 - protein, 220 aa, synthetic construct; identical to SEQ ID NO: 411

SEQ ID NO: 416 - protein, 220 aa, synthetic construct; identical to SEQ ID NO: 321

SEQ ID NO: 417 - protein, 220 aa, synthetic construct; identical to SEQ ID NO: 321

SEQ ID NO: 418 - protein, 220 aa, synthetic construct
DIVMTQSPDSLAVSLGERATINCKSSQSVLSSSNNKNYLAWYQQKPGQPPKLLIYWTSTRESGVPDRFSGSGSGTDFTLTINSLQAEDVAVYYCQQYYRTPWTFGQGTKVEIKRTVAAPSVFIFPPSDEQLKSGTASVVCLLNNFYPREAKVQWKVDNALQSGNSQESVTEQDSKDSTYSLSSTLTLSKADYEKHKVYACEVTHQGLSSPVTKSFNRGEC

SEQ ID NO: 419 - protein, 220 aa, synthetic construct; identical to SEQ ID NO: 411

SEQ ID NO: 420 - protein, 220 aa, synthetic construct; identical to SEQ ID NO: 320

SEQ ID NO: 421 - protein, 220 aa, synthetic construct; identical to SEQ ID NO: 320

SEQ ID NO: 422 - protein, 220 aa, synthetic construct; identical to SEQ ID NO: 320

SEQ ID NO: 423 - protein, 220 aa, synthetic construct; identical to SEQ ID NO: 409

SEQ ID NO: 424 - protein, 220 aa, synthetic construct; identical to SEQ ID NO: 409

SEQ ID NO: 425 - protein, 220 aa, synthetic construct; identical to SEQ ID NO: 321

SEQ ID NO: 426 - protein, 220 aa, synthetic construct; identical to SEQ ID NO: 321

SEQ ID NO: 427 - protein, 220 aa, synthetic construct; identical to SEQ ID NO: 321

SEQ ID NO: 428 - protein, 220 aa, synthetic construct; identical to SEQ ID NO: 321

SEQ ID NO: 429 - protein, 220 aa, synthetic construct; identical to SEQ ID NO: 321

SEQ ID NO: 430 - protein, 220 aa, synthetic construct; identical to SEQ ID NO: 321

SEQ ID NO: 431 - protein, 220 aa, synthetic construct; identical to SEQ ID NO: 321

SEQ ID NO: 432 - protein, 220 aa, synthetic construct; identical to SEQ ID NO: 411

SEQ ID NO: 433 - protein, 220 aa, synthetic construct; identical to SEQ ID NO: 411

SEQ ID NO: 434 - protein, 220 aa, synthetic construct; identical to SEQ ID NO: 411

SEQ ID NO: 435 - protein, 220 aa, synthetic construct; identical to SEQ ID NO: 411

SEQ ID NO: 436 - protein, 220 aa, synthetic construct
DIVMTQSPDSLAVSLGERATINCKSSQSVLSSSNNKNYLAWYQQKPGQPPKLLIYWTSTRDSGVPDRFSGSGSGTDFTLTINSLQAEDVAVYYCQQYYRTPWTFGQGTKVEIKRTVAAPSVFIFPPSDEQLKSGTASVVCLLNNFYPREAKVQWKVDNALQSGNSQESVTEQDSKDSTYSLSSTLTLSKADYEKHKVYACEVTHQGLSSPVTKSFNRGEC

SEQ ID NO: 437 - protein, 220 aa, synthetic construct; identical to SEQ ID NO: 418

SEQ ID NO: 438 - protein, 216 aa, synthetic construct
QSVLTQPPSASGTPGQRVTISCSGSSSNIGSQTVNWYQHLPGTAPKLLIYTNNQRPSGVPDRFSGSKSGTSASLAISGLQSEDEADYFCATFDESLSGPVFGGGTKLTVLGQPKAAPSVTLFPPSSEELQANKATLVCLISDFYPGAVTVAWKADSSPVKAGVETTTPSKQSNNKYAASSYLSLTPEQWKSHRSYSCQVTHEGSTVEKTVAPTECS

SEQ ID NO: 439 - protein, 216 aa, synthetic construct
QSVLTQPPSASGTPGQRVTISCSGSSSNIGSQTVNWYQHLPGTAPKLLIYTNNQRPSGVPDRFSGSKSGTSASLAISGLQSEDEADYFCATFDESLQGPVFGGGTKLTVLGQPKAAPSVTLFPPSSEELQANKATLVCLISDFYPGAVTVAWKADSSPVKAGVETTTPSKQSNNKYAASSYLSLTPEQWKSHRSYSCQVTHEGSTVEKTVAPTECS

SEQ ID NO: 440 - protein, 216 aa, synthetic construct
QSVLTQPPSASGTPGQRVTISCSGSSSNIGSNYVNWYQHLPGTAPKLLIYTNNQRPSGVPDRFSGSKSGTSASLAISGLQSEDEADYFCATFDESLSGPVFGGGTKLTVLGQPKAAPSVTLFPPSSEELQANKATLVCLISDFYPGAVTVAWKADSSPVKAGVETTTPSKQSNNKYAASSYLSLTPEQWKSHRSYSCQVTHEGSTVEKTVAPTECS

SEQ ID NO: 441 - protein, 216 aa, synthetic construct
QSVLTQPPSASGTPGQRVTISCSGSSSNIGSNYVNWYQHLPGTAPKLLIYTNNQRPSGVPDRFSGSKSGTSASLAISGLQSEDEADYFCATFDESLQGPVFGGGTKLTVLGQPKAAPSVTLFPPSSEELQANKATLVCLISDFYPGAVTVAWKADSSPVKAGVETTTPSKQSNNKYAASSYLSLTPEQWKSHRSYSCQVTHEGSTVEKTVAPTECS

SEQ ID NO: 442 - protein, 216 aa, synthetic construct
QSVLTQPPSASGTPGQRVTISCSGSSSNIGSQTVNWYQHLPGTAPKLLIYTNNQRPSGVPDRFSGSKSGTSASLAISGLQSEDEADYFCATFDDSLNGPVFGGGTKLTVLGQPKAAPSVTLFPPSSEELQANKATLVCLISDFYPGAVTVAWKADSSPVKAGVETTTPSKQSNNKYAASSYLSLTPEQWKSHRSYSCQVTHEGSTVEKTVAPTECS

SEQ ID NO: 443 - protein, 216 aa, synthetic construct
QSVLTQPPSASGTPGQRVTISCSGSSSNIGSNYVNWYQHLPGTAPKLLIYTNNQRPSGVPDRFSGSKSGTSASLAISGLQSEDEADYFCATFDDSLNGPVFGGGTKLTVLGQPKAAPSVTLFPPSSEELQANKATLVCLISDFYPGAVTVAWKADSSPVKAGVETTTPSKQSNNKYAASSYLSLTPEQWKSHRSYSCQVTHEGSTVEKTVAPTECS

SEQ ID NO: 444 - protein, 216 aa, synthetic construct
QSVLTQPPSASGTPGQRVTISCSGSSSNIGSNTVNWYQHLPGTAPKLLIYTNNQRPSGVPDRFSGSKSGTSASLAISGLQSEDEADYFCATFDESLNGPVFGGGTKLTVLGQPKAAPSVTLFPPSSEELQANKATLVCLISDFYPGAVTVAWKADSSPVKAGVETTTPSKQSNNKYAASSYLSLTPEQWKSHRSYSCQVTHEGSTVEKTVAPTECS

SEQ ID NO: 445 - protein, 216 aa, synthetic construct
QSVLTQPPSASGTPGQRVTISCSGSSSNIGSNTVNWYQHLPGTAPKLLIYTNNQRPSGVPDRFSGSKSGTSASLAISGLQSEDEADYFCATFDDSLQGPVFGGGTKLTVLGQPKAAPSVTLFPPSSEELQANKATLVCLISDFYPGAVTVAWKADSSPVKAGVETTTPSKQSNNKYAASSYLSLTPEQWKSHRSYSCQVTHEGSTVEKTVAPTECS

SEQ ID NO: 446 - protein, 216 aa, synthetic construct
QSVLTQPPSASGTPGQRVTISCSGSSSNIGSNTVNWYQHLPGTAPKLLIYTNNQRPSGVPDRFSGSKSGTSASLAISGLQSEDEADYFCATFDDSLSGPVFGGGTKLTVLGQPKAAPSVTLFPPSSEELQANKATLVCLISDFYPGAVTVAWKADSSPVKAGVETTTPSKQSNNKYAASSYLSLTPEQWKSHRSYSCQVTHEGSTVEKTVAPTECS

SEQ ID NO: 447 - protein, 216 aa, synthetic construct
QSVLTQPPSASGTPGQRVTISCSGSSSNIGSNTVNWYQHLPGTAPKLLIYTNNQRPSGVPDRFSGSKSGTSASLAISGLQSEDEADYFCATFDDSLNAPVFGGGTKLTVLGQPKAAPSVTLFPPSSEELQANKATLVCLISDFYPGAVTVAWKADSSPVKAGVETTTPSKQSNNKYAASSYLSLTPEQWKSHRSYSCQVTHEGSTVEKTVAPTECS

SEQ ID NO: 448 - protein, 216 aa, synthetic construct
QSVLTQPPSASGTPGQRVTISCSGSSSNIGSNTVNWYQHLPGTAPKLLIYTNNQRPSGVPDRFSGSKSGTSASLAISGLQSEDEADYFCATFDSSLNGPVFGGGTKLTVLGQPKAAPSVTLFPPSSEELQANKATLVCLISDFYPGAVTVAWKADSSPVKAGVETTTPSKQSNNKYAASSYLSLTPEQWKSHRSYSCQVTHEGSTVEKTVAPTECS

SEQ ID NO: 449 - protein, 216 aa, synthetic construct
QSVLTQPPSASGTPGQRVTISCSGSSSNIGSNYVNWYQHLPGTAPKLLIYTNNQRPSGVPDRFSGSKSGTSASLAISGLQSEDEADYFCATFDSSLNAPVFGGGTKLTVLGQPKAAPSVTLFPPSSEELQANKATLVCLISDFYPGAVTVAWKADSSPVKAGVETTTPSKQSNNKYAASSYLSLTPEQWKSHRSYSCQVTHEGSTVEKTVAPTECS

SEQ ID NO: 450 - protein, 216 aa, synthetic construct; identical to SEQ ID NO: 449

SEQ ID NO: 451 - protein, 216 aa, synthetic construct; identical to SEQ ID NO: 438

SEQ ID NO: 452 - protein, 214 aa, synthetic construct
DIQMTQSPSSLSASIGDRVTITCRASQDLRNYLGWYQQKPGKAPKRLIYGASSLQSGVPSRFSGSGSGTEFTLTISSLQPEDFATYYCLQHNNYPFTFGQGTKVDIKRTVAAPSVFIFPPSDEQLKSGTASVVCLLNNFYPREAKVQWKVDNALQSGNSQESVTEQDSKDSTYSLSSTLTLSKADYEKHKVYACEVTHQGLSSPVTKSFNRGEC

SEQ ID NO: 453 - protein, 214 aa, synthetic construct; identical to SEQ ID NO: 336

SEQ ID NO: 454 - protein, 216 aa, synthetic construct
QSVLTQPPSASGTPGQRVTISCSGSSSNIGSNTVNWYQQLPGTAPKLLIYTNNQRPSGVPDRFSGSKSGTSASLAISGLQSEDEADYFCATFDSSLSGPVFGGGTKLTVLGQPKAAPSVTLFPPSSEELQANKATLVCLISDFYPGAVTVAWKADSSPVKAGVETTTPSKQSNNKYAASSYLSLTPEQWKSHRSYSCQVTHEGSTVEKTVAPTECS

SEQ ID NO: 455 - protein, 214 aa, synthetic construct
DIQLTQSPSSLSASVGDRVTITCRASQTISRFLNWYQQKPGKAPELLIYVASSLQSGVPSRFSGSGSGTDFTLTISSLQPEDFATYYCQQSYSTLISFGQGTKLEITRTVAAPSVFIFPPSDEQLKSGTASVVCLLNNFYPREAKVQWKVDNALQSGNSQESVTEQDSKDSTYSLSSTLTLSKADYEKHKVYACEVTHQGLSSPVTKSFNRGEC

SEQ ID NO: 456 - protein, 216 aa, synthetic construct
QSVLTQPPSVSAAPGQKVTISCSGSSSNIGNNYVSWYEQFPGTAPKLLIYDNNKRPSGIPDRFSGSKSGTSATLGITGLQTGDEADYYCGTWDSSLSAVVFGGGTKLTVLGQPKAAPSVTLFPPSSEELQANKATLVCLISDFYPGAVTVAWKADSSPVKAGVETTTPSKQSNNKYAASSYLSLTPEQWKSHRSYSCQVTHEGSTVEKTVAPTECS

SEQ ID NO: 457 - protein, 214 aa, synthetic construct
DIQLTQSPSSLSASVGDRVTITCRASQTISRFLNWYQQKPGKAPELLIYVASSLQSGVPSRFSGSGSGTDFTLTISSLQPEDFATYYCQQSYSTLISFGQGTKLEIKRTVAAPSVFIFPPSDEQLKSGTASVVCLLNNFYPREAKVQWKVDNALQSGNSQESVTEQDSKDSTYSLSSTLTLSKADYEKHKVYACEVTHQGLSSPVTKSFNRGEC

SEQ ID NO: 458 - protein, 214 aa, synthetic construct; identical to SEQ ID NO: 457

SEQ ID NO: 459 - protein, 214 aa, synthetic construct; identical to SEQ ID NO: 455

SEQ ID NO: 460 - protein, 214 aa, synthetic construct
DIQLTQSPSSLSASVGDRVTITCRASQTISRFLNWYQQKPGKAPKLLIYVASSLQSGVPSRFSGSGSGTDFTLTISSLQPEDFATYYCQQSYSTLISFGQGTKLEIKRTVAAPSVFIFPPSDEQLKSGTASVVCLLNNFYPREAKVQWKVDNALQSGNSQESVTEQDSKDSTYSLSSTLTLSKADYEKHKVYACEVTHQGLSSPVTKSFNRGEC

SEQ ID NO: 461 - protein, 214 aa, synthetic construct; identical to SEQ ID NO: 457

SEQ ID NO: 462 - protein, 214 aa, synthetic construct; identical to SEQ ID NO: 457

SEQ ID NO: 463 - protein, 216 aa, synthetic construct
QSVLTQPPSVSAAPGQKVTISCSGSSSNIGNNYVSWYQQLPGTAPKLLIYDNNKRPSGIPDRFSGSKSGTSATLGITGLQTGDEADYYCGTWDSSLSAVVFGGGTKLTVLGQPKAAPSVTLFPPSSEELQANKATLVCLISDFYPGAVTVAWKADSSPVKAGVETTTPSKQSNNKYAASSYLSLTPEQWKSHRSYSCQVTHEGSTVEKTVAPTECS

SEQ ID NO: 464 - protein, 216 aa, synthetic construct; identical to SEQ ID NO: 463

SEQ ID NO: 465 - protein, 216 aa, synthetic construct; identical to SEQ ID NO: 456

SEQ ID NO: 466 - protein, 216 aa, synthetic construct
QSVLTQPPSVSAAPGQKVTISCSGSSSNIGNNYVSWYQQLPGTAPKLLIYDNNKRPSGIPDRFSGSKSGTSATLAITGLQTGDEADYYCGTFESSLSAVVFGGGTKLTVLGQPKAAPSVTLFPPSSEELQANKATLVCLISDFYPGAVTVAWKADSSPVKAGVETTTPSKQSNNKYAASSYLSLTPEQWKSHRSYSCQVTHEGSTVEKTVAPTECS

SEQ ID NO: 467 - protein, 216 aa, synthetic construct
QSVLTQPPSVSAAPGQKVTISCSGSSSNIGNNYVSWYQQLPGTAPKLLIYDNNKRPSGIPDRFSGSKSGTSATLAITGLQTGDEADYYCGTWDSSLSAVVFGGGTKLTVLGQPKAAPSVTLFPPSSEELQANKATLVCLISDFYPGAVTVAWKADSSPVKAGVETTTPSKQSNNKYAASSYLSLTPEQWKSHRSYSCQVTHEGSTVEKTVAPTECS

SEQ ID NO: 468 - protein, 216 aa, synthetic construct; identical to SEQ ID NO: 467

SEQ ID NO: 469 - protein, 216 aa, synthetic construct; identical to SEQ ID NO: 463

SEQ ID NO: 470 - protein, 216 aa, synthetic construct; identical to SEQ ID NO: 466

SEQ ID NO: 471 - protein, 214 aa, synthetic construct
DIQLTQSPSSLSASVGDRVTITCRASQTISRFLNWYQQKPGKAPKLLIYVASSLQSGVPSRFSGSGSGTDFTLTISSLQPEDFATYYCQQSYSTLLSFGQGTKLEIKRTVAAPSVFIFPPSDEQLKSGTASVVCLLNNFYPREAKVQWKVDNALQSGNSQESVTEQDSKDSTYSLSSTLTLSKADYEKHKVYACEVTHQGLSSPVTKSFNRGEC

SEQ ID NO: 472 - protein, 458 aa, synthetic construct
QMQVVQSGAEVKKPGASVKVSCKASGYTFTGYYMHWVRQAPGQGLEWMGWINPNSGGTNYAQKFQGRVTMTRDTSISTAYMELSRLRSDDTAVYYCARGGDYVWGTYRPHYYYGMDVWGQGTTVTVSSASTKGPSVFPLAPSSKSTSGGTAALGCLVKDYFPEPVTVSWNSGALTSGVHTFPAVLQSSGLYSLSSVVTVPSSSLGTQTYICNVNHKPSNTKVDKKVEPKSCDKTHTCPPCPAPELLGGPSVFLFPPKPKDTLMISRTPEVTCVVVDVSHEDPEVKFNWYVDGVEVHNAKTKPCEEQYGSTYRCVSVLTVLHQDWLNGKEYKCKVSNKALPAPIEKTISKAKGQPREPQVYTLPPSREEMTKNQVSLTCLVKGFYPSDIAVEWESNGQPENNYKTTPPVLDSDGSFFLYSKLTVDKSRWQQGNVFSCSVMHEALHNHYTQKSLSLSPGK

SEQ ID NO: 473 - protein, 451 aa, synthetic construct
QVQLVESGGGVVQPGRSLRLSCAASGFTFSNFGMHWVRQAPGKGLEWVAVIWYDGSNENYADSVKGRFTISRDNSKNTLYLHMNSLRVADTAVYYCARDGTIFGVVLGDYWGQGTLVTVSSASTKGPSVFPLAPSSKSTSGGTAALGCLVKDYFPEPVTVSWNSGALTSGVHTFPAVLQSSGLYSLSSVVTVPSSSLGTQTYICNVNHKPSNTKVDKKVEPKSCDKTHTCPPCPAPELLGGPSVFLFPPKPKDTLMISRTPEVTCVVVDVSHEDPEVKFNWYVDGVEVHNAKTKPCEEQYGSTYRCVSVLTVLHQDWLNGKEYKCKVSNKALPAPIEKTISKAKGQPREPQVYTLPPSREEMTKNQVSLTCLVKGFYPSDIAVEWESNGQPENNYKTTPPVLDSDGSFFLYSKLTVDKSRWQQGNVFSCSVMHEALHNHYTQKSLSLSPGK

SEQ ID NO: 474 - protein, 451 aa, synthetic construct
QVQLVESGGGVVQPGRSLRLSCAASGFTFSYFGMHWVRQAPGKGLEWVAVIWYDGSNKYYADSVKGRFTISRDNSKNTLYLQMNSLRAEDTAVYYCARDGTIFGVLLGDYWGQGTLVTVSSASTKGPSVFPLAPSSKSTSGGTAALGCLVKDYFPEPVTVSWNSGALTSGVHTFPAVLQSSGLYSLSSVVTVPSSSLGTQTYICNVNHKPSNTKVDKKVEPKSCDKTHTCPPCPAPELLGGPSVFLFPPKPKDTLMISRTPEVTCVVVDVSHEDPEVKFNWYVDGVEVHNAKTKPCEEQYGSTYRCVSVLTVLHQDWLNGKEYKCKVSNKALPAPIEKTISKAKGQPREPQVYTLPPSREEMTKNQVSLTCLVKGFYPSDIAVEWESNGQPENNYKTTPPVLDSDGSFFLYSKLTVDKSRWQQGNVFSCSVMHEALHNHYTQKSLSLSPGK

SEQ ID NO: 475 - protein, 450 aa, synthetic construct
QVQLVESGGGVVQPGRSLRLSCAASGFTFSSYGMHWVRQAPGKGLEWVAVIWYDGSNKYYADSVKGRFTISSDNSKNTLYLQMNSLRAEDTAVYYCARDRTIFGVVLDYWGQGTLVTVSSASTKGPSVFPLAPSSKSTSGGTAALGCLVKDYFPEPVTVSWNSGALTSGVHTFPAVLQSSGLYSLSSVVTVPSSSLGTQTYICNVNHKPSNTKVDKKVEPKSCDKTHTCPPCPAPELLGGPSVFLFPPKPKDTLMISRTPEVTCVVVDVSHEDPEVKFNWYVDGVEVHNAKTKPCEEQYGSTYRCVSVLTVLHQDWLNGKEYKCKVSNKALPAPIEKTISKAKGQPREPQVYTLPPSREEMTKNQVSLTCLVKGFYPSDIAVEWESNGQPENNYKTTPPVLDSDGSFFLYSKLTVDKSRWQQGNVFSCSVMHEALHNHYTQKSLSLSPGK

SEQ ID NO: 476 - protein, 453 aa, synthetic construct
QVPLVQSGAEVKKPGASVKVSCKASGYTFTGYYIHWVRQAPGQGLEWMGWINPDSGGTDYSQRFQGRFTMTRDTSISTAYMELNRLRSDDTAVYYCAREATIFGMVIVPFDYWGQGTLVTVSSASTKGPSVFPLAPSSKSTSGGTAALGCLVKDYFPEPVTVSWNSGALTSGVHTFPAVLQSSGLYSLSSVVTVPSSSLGTQTYICNVNHKPSNTKVDKKVEPKSCDKTHTCPPCPAPELLGGPSVFLFPPKPKDTLMISRTPEVTCVVVDVSHEDPEVKFNWYVDGVEVHNAKTKPCEEQYGSTYRCVSVLTVLHQDWLNGKEYKCKVSNKALPAPIEKTISKAKGQPREPQVYTLPPSREEMTKNQVSLTCLVKGFYPSDIAVEWESNGQPENNYKTTPPVLDSDGSFFLYSKLTVDKSRWQQGNVFSCSVMHEALHNHYTQKSLSLSPGK

SEQ ID NO: 477 - protein, 453 aa, synthetic construct
QVPLVQSGAEVKKPGASVKVSCKASGYTFTGYYIHWVRQAPGQGLEWMGWINPDSGGTDYSQRFQGRFTMTRDTSISTAYMELSRLRSDDTAVYYCAREATIFGMVIVPFDYWGQGTLVTVSSASTKGPSVFPLAPSSKSTSGGTAALGCLVKDYFPEPVTVSWNSGALTSGVHTFPAVLQSSGLYSLSSVVTVPSSSLGTQTYICNVNHKPSNTKVDKKVEPKSCDKTHTCPPCPAPELLGGPSVFLFPPKPKDTLMISRTPEVTCVVVDVSHEDPEVKFNWYVDGVEVHNAKTKPCEEQYGSTYRCVSVLTVLHQDWLNGKEYKCKVSNKALPAPIEKTISKAKGQPREPQVYTLPPSREEMTKNQVSLTCLVKGFYPSDIAVEWESNGQPENNYKTTPPVLDSDGSFFLYSKLTVDKSRWQQGNVFSCSVMHEALHNHYTQKSLSLSPGK

SEQ ID NO: 478 - protein, 453 aa, synthetic construct
QVPLVQSGAEVKKPGASVKVSCKASGYTFTGYYIHWVRQAPGQGLVWMGWISPNSGDTSYAQKFQDRVTMTRDTSISTAYMELSRLRSDDTAVYFCTREATIFGMLIVPFDYWGQGTLVTVSSASTKGPSVFPLAPSSKSTSGGTAALGCLVKDYFPEPVTVSWNSGALTSGVHTFPAVLQSSGLYSLSSVVTVPSSSLGTQTYICNVNHKPSNTKVDKKVEPKSCDKTHTCPPCPAPELLGGPSVFLFPPKPKDTLMISRTPEVTCVVVDVSHEDPEVKFNWYVDGVEVHNAKTKPCEEQYGSTYRCVSVLTVLHQDWLNGKEYKCKVSNKALPAPIEKTISKAKGQPREPQVYTLPPSREEMTKNQVSLTCLVKGFYPSDIAVEWESNGQPENNYKTTPPVLDSDGSFFLYSKLTVDKSRWQQGNVFSCSVMHEALHNHYTQKSLSLSPGK

SEQ ID NO: 479 - protein, 453 aa, synthetic construct
QVPLVQSGAEVKKPGASVKVSCKASGYTFTGYYIHWVRQAPGQGLEWMGWISPNNGDTNYAQKFQDRVTMTRDTSISTAYMELSRLRSDDTAVYYCTREATIFGMLIVPFDYWGQGTLVTVSSASTKGPSVFPLAPSSKSTSGGTAALGCLVKDYFPEPVTVSWNSGALTSGVHTFPAVLQSSGLYSLSSVVTVPSSSLGTQTYICNVNHKPSNTKVDKKVEPKSCDKTHTCPPCPAPELLGGPSVFLFPPKPKDTLMISRTPEVTCVVVDVSHEDPEVKFNWYVDGVEVHNAKTKPCEEQYGSTYRCVSVLTVLHQDWLNGKEYKCKVSNKALPAPIEKTISKAKGQPREPQVYTLPPSREEMTKNQVSLTCLVKGFYPSDIAVEWESNGQPENNYKTTPPVLDSDGSFFLYSKLTVDKSRWQQGNVFSCSVMHEALHNHYTQKSLSLSPGK

SEQ ID NO: 480 - protein, 456 aa, synthetic construct
QVQLQESGPGLVKPSQTLSLTCTVSGDSISSGGYYWSWIRQHPGKGLEWIGYIYYSGSTYYNPSLKSRVTISVDTSKNQFSLKLSSVTAADTAVYYCARDRITIFGVVMGGGMDVWGQGTTVTVSSASTKGPSVFPLAPSSKSTSGGTAALGCLVKDYFPEPVTVSWNSGALTSGVHTFPAVLQSSGLYSLSSVVTVPSSSLGTQTYICNVNHKPSNTKVDKKVEPKSCDKTHTCPPCPAPELLGGPSVFLFPPKPKDTLMISRTPEVTCVVVDVSHEDPEVKFNWYVDGVEVHNAKTKPCEEQYGSTYRCVSVLTVLHQDWLNGKEYKCKVSNKALPAPIEKTISKAKGQPREPQVYTLPPSREEMTKNQVSLTCLVKGFYPSDIAVEWESNGQPENNYKTTPPVLDSDGSFFLYSKLTVDKSRWQQGNVFSCSVMHEALHNHYTQKSLSLSPGK

SEQ ID NO: 481 - protein, 450 aa, synthetic construct
QVQLVESGGGVVQPGRSLRLSCAASGFTFSNYGMHWVRQAPGEGLEWVAAIWFDGSDKYYADSVKGRFTISRDNSKNTLYLQMNSLRAEDTAVYYCARDQAIFGVVPDYWGQGTLVTVSSASTKGPSVFPLAPSSKSTSGGTAALGCLVKDYFPEPVTVSWNSGALTSGVHTFPAVLQSSGLYSLSSVVTVPSSSLGTQTYICNVNHKPSNTKVDKKVEPKSCDKTHTCPPCPAPELLGGPSVFLFPPKPKDTLMISRTPEVTCVVVDVSHEDPEVKFNWYVDGVEVHNAKTKPCEEQYGSTYRCVSVLTVLHQDWLNGKEYKCKVSNKALPAPIEKTISKAKGQPREPQVYTLPPSREEMTKNQVSLTCLVKGFYPSDIAVEWESNGQPENNYKTTPPVLDSDGSFFLYSKLTVDKSRWQQGNVFSCSVMHEALHNHYTQKSLSLSPGK

SEQ ID NO: 482 - protein, 451 aa, synthetic construct; identical to SEQ ID NO: 474

SEQ ID NO: 483 - protein, 450 aa, synthetic construct
QVQLVESGGGVVQPGRSLRLSCAASGFSFSSYGMHWVRQPPGKGLEWVAAIWYDGNNKYYADSVKGRFTISRDSSKNTLYLQMNSLRAEDTAVYYCARDRTIFGVVLEYLGQGTLVTVSSASTKGPSVFPLAPSSKSTSGGTAALGCLVKDYFPEPVTVSWNSGALTSGVHTFPAVLQSSGLYSLSSVVTVPSSSLGTQTYICNVNHKPSNTKVDKKVEPKSCDKTHTCPPCPAPELLGGPSVFLFPPKPKDTLMISRTPEVTCVVVDVSHEDPEVKFNWYVDGVEVHNAKTKPCEEQYGSTYRCVSVLTVLHQDWLNGKEYKCKVSNKALPAPIEKTISKAKGQPREPQVYTLPPSREEMTKNQVSLTCLVKGFYPSDIAVEWESNGQPENNYKTTPPVLDSDGSFFLYSKLTVDKSRWQQGNVFSCSVMHEALHNHYTQKSLSLSPGK

SEQ ID NO: 484 - protein, 447 aa, synthetic construct
QVQLQESGPGLVKPSETLSLTCTVSQGSISSYYWSWIRQPAGKGLEWIGRIYTSGSTNYNPSLKSRVTMSIDTSKNQFSLKLNSVTAADTAVYYCARDVAVAGFDYWGQGTLVTVSSASTKGPSVFPLAPSSKSTSGGTAALGCLVKDYFPEPVTVSWNSGALTSGVHTFPAVLQSSGLYSLSSVVTVPSSSLGTQTYICNVNHKPSNTKVDKKVEPKSCDKTHTCPPCPAPELLGGPSVFLFPPKPKDTLMISRTPEVTCVVVDVSHEDPEVKFNWYVDGVEVHNAKTKPCEEQYGSTYRCVSVLTVLHQDWLNGKEYKCKVSNKALPAPIEKTISKAKGQPREPQVYTLPPSREEMTKNQVSLTCLVKGFYPSDIAVEWESNGQPENNYKTTPPVLDSDGSFFLYSKLTVDKSRWQQGNVFSCSVMHEALHNHYTQKSLSLSPGK

SEQ ID NO: 485 - protein, 447 aa, synthetic construct
QVQLQESGPGLVKPSETLSLTCTVSGGSISSYYWSWIRQPAGKGLEWIGRIYTSGSTNYNPSLKSRVTMSIDTSKNQFSLKLNSVTAADTAVYYCARDVAVAGFDYWGQGTLVTVSSASTKGPSVFPLAPSSKSTSGGTAALGCLVKDYFPEPVTVSWNSGALTSGVHTFPAVLQSSGLYSLSSVVTVPSSSLGTQTYICNVNHKPSNTKVDKKVEPKSCDKTHTCPPCPAPELLGGPSVFLFPPKPKDTLMISRTPEVTCVVVDVSHEDPEVKFNWYVDGVEVHNAKTKPCEEQYGSTYRCVSVLTVLHQDWLNGKEYKCKVSNKALPAPIEKTISKAKGQPREPQVYTLPPSREEMTKNQVSLTCLVKGFYPSDIAVEWESNGQPENNYKTTPPVLDSDGSFFLYSKLTVDKSRWQQGNVFSCSVMHEALHNHYTQKSLSLSPGK

SEQ ID NO: 486 - protein, 451 aa, synthetic construct
QVQLVESGGGVVQPGRSLRLSCAASGFTFSYFGMHWVRQAPGKGLEWVAVIWYDASNKYYADAVKGRFTISRDNSKNTLYLQMNSLRAEDTAVYYCARDGTIFGVLLGDYWGQGTLVTVSSASTKGPSVFPLAPSSKSTSGGTAALGCLVKDYFPEPVTVSWNSGALTSGVHTFPAVLQSSGLYSLSSVVTVPSSSLGTQTYICNVNHKPSNTKVDKKVEPKSCDKTHTCPPCPAPELLGGPSVFLFPPKPKDTLMISRTPEVTCVVVDVSHEDPEVKFNWYVDGVEVHNAKTKPCEEQYGSTYRCVSVLTVLHQDWLNGKEYKCKVSNKALPAPIEKTISKAKGQPREPQVYTLPPSREEMTKNQVSLTCLVKGFYPSDIAVEWESNGQPENNYKTTPPVLDSDGSFFLYSKLTVDKSRWQQGNVFSCSVMHEALHNHYTQKSLSLSPGK

SEQ ID NO: 487 - protein, 451 aa, synthetic construct
QVQLVESGGGVVQPGRSLRLSCAASGFTFSYFGMHWVRQAPGKGLEWVAVIWYDASNKYYADSVKGRFTISRDNSKNTLYLQMNSLRAEDTAVYYCARDGTIFGVLLGDYWGQGTLVTVSSASTKGPSVFPLAPSSKSTSGGTAALGCLVKDYFPEPVTVSWNSGALTSGVHTFPAVLQSSGLYSLSSVVTVPSSSLGTQTYICNVNHKPSNTKVDKKVEPKSCDKTHTCPPCPAPELLGGPSVFLFPPKPKDTLMISRTPEVTCVVVDVSHEDPEVKFNWYVDGVEVHNAKTKPCEEQYGSTYRCVSVLTVLHQDWLNGKEYKCKVSNKALPAPIEKTISKAKGQPREPQVYTLPPSREEMTKNQVSLTCLVKGFYPSDIAVEWESNGQPENNYKTTPPVLDSDGSFFLYSKLTVDKSRWQQGNVFSCSVMHEALHNHYTQKSLSLSPGK

SEQ ID NO: 488 - protein, 451 aa, synthetic construct
QVQLVESGGGVVQPGRSLRLSCAASGFTFSYFGMHWVRQAPGKGLEWVAVIWYDGSNKYYADAVKGRFTISRDNSKNTLYLQMNSLRAEDTAVYYCARDGTIFGVLLGDYWGQGTLVTVSSASTKGPSVFPLAPSSKSTSGGTAALGCLVKDYFPEPVTVSWNSGALTSGVHTFPAVLQSSGLYSLSSVVTVPSSSLGTQTYICNVNHKPSNTKVDKKVEPKSCDKTHTCPPCPAPELLGGPSVFLFPPKPKDTLMISRTPEVTCVVVDVSHEDPEVKFNWYVDGVEVHNAKTKPCEEQYGSTYRCVSVLTVLHQDWLNGKEYKCKVSNKALPAPIEKTISKAKGQPREPQVYTLPPSREEMTKNQVSLTCLVKGFYPSDIAVEWESNGQPENNYKTTPPVLDSDGSFFLYSKLTVDKSRWQQGNVFSCSVMHEALHNHYTQKSLSLSPGK

SEQ ID NO: 489 - protein, 451 aa, synthetic construct; identical to SEQ ID NO: 486

SEQ ID NO: 490 - protein, 451 aa, synthetic construct; identical to SEQ ID NO: 486

SEQ ID NO: 491 - protein, 451 aa, synthetic construct
QVQLVESGGGVVQPGRSLRLSCAASGFTFSYFGMHWVRQAPGKGLEWVAVIWYDASNKYYADAVKGRFTISRDNSKNTLYLQMNSLRAEDTAVYYCARDRTIFGVLLGDYWGQGTLVTVSSASTKGPSVFPLAPSSKSTSGGTAALGCLVKDYFPEPVTVSWNSGALTSGVHTFPAVLQSSGLYSLSSVVTVPSSSLGTQTYICNVNHKPSNTKVDKKVEPKSCDKTHTCPPCPAPELLGGPSVFLFPPKPKDTLMISRTPEVTCVVVDVSHEDPEVKFNWYVDGVEVHNAKTKPCEEQYGSTYRCVSVLTVLHQDWLNGKEYKCKVSNKALPAPIEKTISKAKGQPREPQVYTLPPSREEMTKNQVSLTCLVKGFYPSDIAVEWESNGQPENNYKTTPPVLDSDGSFFLYSKLTVDKSRWQQGNVFSCSVMHEALHNHYTQKSLSLSPGK

SEQ ID NO: 492 - protein, 451 aa, synthetic construct
QVQLVESGGGVVQPGRSLRLSCAASGFTFSNFGMHWVRQAPGKGLEWVAVIWYDASNENYADAVKGRFTISRDNSKNTLYLQMNSLRVADTAVYYCARDGTIFGVVLGDYWGQGTLVTVSSASTKGPSVFPLAPSSKSTSGGTAALGCLVKDYFPEPVTVSWNSGALTSGVHTFPAVLQSSGLYSLSSVVTVPSSSLGTQTYICNVNHKPSNTKVDKKVEPKSCDKTHTCPPCPAPELLGGPSVFLFPPKPKDTLMISRTPEVTCVVVDVSHEDPEVKFNWYVDGVEVHNAKTKPCEEQYGSTYRCVSVLTVLHQDWLNGKEYKCKVSNKALPAPIEKTISKAKGQPREPQVYTLPPSREEMTKNQVSLTCLVKGFYPSDIAVEWESNGQPENNYKTTPPVLDSDGSFFLYSKLTVDKSRWQQGNVFSCSVMHEALHNHYTQKSLSLSPGK

SEQ ID NO: 493 - protein, 451 aa, synthetic construct; identical to SEQ ID NO: 492

SEQ ID NO: 494 - protein, 451 aa, synthetic construct; identical to SEQ ID NO: 492

SEQ ID NO: 495 - protein, 451 aa, synthetic construct
QVQLVESGGGVVQPGRSLRLSCAASGFTFSNFGMHWVRQAPGKGLEWVAVIWYDASNENYADSVKGRFTISRDNSKNTLYLHMNSLRVADTAVYYCARDGTIFGVVLGDYWGQGTLVTVSSASTKGPSVFPLAPSSKSTSGGTAALGCLVKDYFPEPVTVSWNSGALTSGVHTFPAVLQSSGLYSLSSVVTVPSSSLGTQTYICNVNHKPSNTKVDKKVEPKSCDKTHTCPPCPAPELLGGPSVFLFPPKPKDTLMISRTPEVTCVVVDVSHEDPEVKFNWYVDGVEVHNAKTKPCEEQYGSTYRCVSVLTVLHQDWLNGKEYKCKVSNKALPAPIEKTISKAKGQPREPQVYTLPPSREEMTKNQVSLTCLVKGFYPSDIAVEWESNGQPENNYKTTPPVLDSDGSFFLYSKLTVDKSRWQQGNVFSCSVMHEALHNHYTQKSLSLSPGK

SEQ ID NO: 496 - protein, 451 aa, synthetic construct
QVQLVESGGGVVQPGRSLRLSCAASGFTFSNFGMHWVRQAPGKGLEWVAVIWYDGSNENYADAVKGRFTISRDNSKNTLYLHMNSLRVADTAVYYCARDGTIFGVVLGDYWGQGTLVTVSSASTKGPSVFPLAPSSKSTSGGTAALGCLVKDYFPEPVTVSWNSGALTSGVHTFPAVLQSSGLYSLSSVVTVPSSSLGTQTYICNVNHKPSNTKVDKKVEPKSCDKTHTCPPCPAPELLGGPSVFLFPPKPKDTLMISRTPEVTCVVVDVSHEDPEVKFNWYVDGVEVHNAKTKPCEEQYGSTYRCVSVLTVLHQDWLNGKEYKCKVSNKALPAPIEKTISKAKGQPREPQVYTLPPSREEMTKNQVSLTCLVKGFYPSDIAVEWESNGQPENNYKTTPPVLDSDGSFFLYSKLTVDKSRWQQGNVFSCSVMHEALHNHYTQKSLSLSPGK

SEQ ID NO: 497 - protein, 451 aa, synthetic construct
QVQLVESGGGVVQPGRSLRLSCAASGFTFSNFGMHWVRQAPGKGLEWVAVIWYDASNENYADAVKGRFTISRDNSKNTLYLQMNSLRVEDTAVYYCARDRTIFGVVLGDYWGQGTLVTVSSASTKGPSVFPLAPSSKSTSGGTAALGCLVKDYFPEPVTVSWNSGALTSGVHTFPAVLQSSGLYSLSSVVTVPSSSLGTQTYICNVNHKPSNTKVDKKVEPKSCDKTHTCPPCPAPELLGGPSVFLFPPKPKDTLMISRTPEVTCVVVDVSHEDPEVKFNWYVDGVEVHNAKTKPCEEQYGSTYRCVSVLTVLHQDWLNGKEYKCKVSNKALPAPIEKTISKAKGQPREPQVYTLPPSREEMTKNQVSLTCLVKGFYPSDIAVEWESNGQPENNYKTTPPVLDSDGSFFLYSKLTVDKSRWQQGNVFSCSVMHEALHNHYTQKSLSLSPGK

SEQ ID NO: 498 - protein, 451 aa, synthetic construct
QVQLVESGGGVVQPGRSLRLSCAASGFTFSNFGMHWVRQAPGKGLEWVAVIWYDASNENYADAVKGRFTISRDNSKNTLYLQMNSLRVEDTAVYYCARDGTIFGVVLGDYWGQGTLVTVSSASTKGPSVFPLAPSSKSTSGGTAALGCLVKDYFPEPVTVSWNSGALTSGVHTFPAVLQSSGLYSLSSVVTVPSSSLGTQTYICNVNHKPSNTKVDKKVEPKSCDKTHTCPPCPAPELLGGPSVFLFPPKPKDTLMISRTPEVTCVVVDVSHEDPEVKFNWYVDGVEVHNAKTKPCEEQYGSTYRCVSVLTVLHQDWLNGKEYKCKVSNKALPAPIEKTISKAKGQPREPQVYTLPPSREEMTKNQVSLTCLVKGFYPSDIAVEWESNGQPENNYKTTPPVLDSDGSFFLYSKLTVDKSRWQQGNVFSCSVMHEALHNHYTQKSLSLSPGK

SEQ ID NO: 499 - protein, 451 aa, synthetic construct
QVQLVESGGGVVQPGRSLRLSCAASGFTFSNFGMHWVRQAPGKGLEWVAVIWYDGSNENYADSVKGRFTISRDNSKNTLYLHMNSLRAADTAVYYCARDGTIFGVVLGDYWGQGTLVTVSSASTKGPSVFPLAPSSKSTSGGTAALGCLVKDYFPEPVTVSWNSGALTSGVHTFPAVLQSSGLYSLSSVVTVPSSSLGTQTYICNVNHKPSNTKVDKKVEPKSCDKTHTCPPCPAPELLGGPSVFLFPPKPKDTLMISRTPEVTCVVVDVSHEDPEVKFNWYVDGVEVHNAKTKPCEEQYGSTYRCVSVLTVLHQDWLNGKEYKCKVSNKALPAPIEKTISKAKGQPREPQVYTLPPSREEMTKNQVSLTCLVKGFYPSDIAVEWESNGQPENNYKTTPPVLDSDGSFFLYSKLTVDKSRWQQGNVFSCSVMHEALHNHYTQKSLSLSPGK

SEQ ID NO: 500 - protein, 451 aa, synthetic construct
QVQLVESGGGVVQPGRSLRLSCAASGFTFSNFGMHWVRQAPGKGLEWVAVIWYDASNENYADAVKGRFTISRDNSKNTLYLQMNSLRAADTAVYYCARDGTIFGVVLGDYWGQGTLVTVSSASTKGPSVFPLAPSSKSTSGGTAALGCLVKDYFPEPVTVSWNSGALTSGVHTFPAVLQSSGLYSLSSVVTVPSSSLGTQTYICNVNHKPSNTKVDKKVEPKSCDKTHTCPPCPAPELLGGPSVFLFPPKPKDTLMISRTPEVTCVVVDVSHEDPEVKFNWYVDGVEVHNAKTKPCEEQYGSTYRCVSVLTVLHQDWLNGKEYKCKVSNKALPAPIEKTISKAKGQPREPQVYTLPPSREEMTKNQVSLTCLVKGFYPSDIAVEWESNGQPENNYKTTPPVLDSDGSFFLYSKLTVDKSRWQQGNVFSCSVMHEALHNHYTQKSLSLSPGK

SEQ ID NO: 501 - protein, 451 aa, synthetic construct
QVQLVESGGGVVQPGRSLRLSCAASGFTFSNFGMHWVRQAPGKGLEWVAVIWYDASNENYADAVKGRFTISRDNSKNTLYLHMNSLRAADTAVYYCARDGTIFGVVLGDYWGQGTLVTVSSASTKGPSVFPLAPSSKSTSGGTAALGCLVKDYFPEPVTVSWNSGALTSGVHTFPAVLQSSGLYSLSSVVTVPSSSLGTQTYICNVNHKPSNTKVDKKVEPKSCDKTHTCPPCPAPELLGGPSVFLFPPKPKDTLMISRTPEVTCVVVDVSHEDPEVKFNWYVDGVEVHNAKTKPCEEQYGSTYRCVSVLTVLHQDWLNGKEYKCKVSNKALPAPIEKTISKAKGQPREPQVYTLPPSREEMTKNQVSLTCLVKGFYPSDIAVEWESNGQPENNYKTTPPVLDSDGSFFLYSKLTVDKSRWQQGNVFSCSVMHEALHNHYTQKSLSLSPGK

SEQ ID NO: 502 - protein, 451 aa, synthetic construct; identical to SEQ ID NO: 500

SEQ ID NO: 503 - protein, 451 aa, synthetic construct; identical to SEQ ID NO: 500

SEQ ID NO: 504 - protein, 451 aa, synthetic construct; identical to SEQ ID NO: 501

SEQ ID NO: 505 - protein, 451 aa, synthetic construct; identical to SEQ ID NO: 501

SEQ ID NO: 506 - protein, 451 aa, synthetic construct; identical to SEQ ID NO: 500

SEQ ID NO: 507 - protein, 451 aa, synthetic construct
QVQLVESGGGVVQPGRSLRLSCAASGFTFSNFGMHWVRQAPGKGLEWVAVIWYDGSNENYADAVKGRFTISRDNSKNTLYLQMNSLRAADTAVYYCARDGTIFGVVLGDYWGQGTLVTVSSASTKGPSVFPLAPSSKSTSGGTAALGCLVKDYFPEPVTVSWNSGALTSGVHTFPAVLQSSGLYSLSSVVTVPSSSLGTQTYICNVNHKPSNTKVDKKVEPKSCDKTHTCPPCPAPELLGGPSVFLFPPKPKDTLMISRTPEVTCVVVDVSHEDPEVKFNWYVDGVEVHNAKTKPCEEQYGSTYRCVSVLTVLHQDWLNGKEYKCKVSNKALPAPIEKTISKAKGQPREPQVYTLPPSREEMTKNQVSLTCLVKGFYPSDIAVEWESNGQPENNYKTTPPVLDSDGSFFLYSKLTVDKSRWQQGNVFSCSVMHEALHNHYTQKSLSLSPGK

SEQ ID NO: 508 - protein, 451 aa, synthetic construct
QVQLVESGGGVVQPGRSLRLSCAASGFTFSNFGMHWVRQAPGKGLEWVAVIWYDASNENYADSVKGRFTISRDNSKNTLYLQMNSLRAADTAVYYCARDGTIFGVVLGDYWGQGTLVTVSSASTKGPSVFPLAPSSKSTSGGTAALGCLVKDYFPEPVTVSWNSGALTSGVHTFPAVLQSSGLYSLSSVVTVPSSSLGTQTYICNVNHKPSNTKVDKKVEPKSCDKTHTCPPCPAPELLGGPSVFLFPPKPKDTLMISRTPEVTCVVVDVSHEDPEVKFNWYVDGVEVHNAKTKPCEEQYGSTYRCVSVLTVLHQDWLNGKEYKCKVSNKALPAPIEKTISKAKGQPREPQVYTLPPSREEMTKNQVSLTCLVKGFYPSDIAVEWESNGQPENNYKTTPPVLDSDGSFFLYSKLTVDKSRWQQGNVFSCSVMHEALHNHYTQKSLSLSPGK

SEQ ID NO: 509 - protein, 451 aa, synthetic construct
QVQLVESGGGVVQPGRSLRLSCAASGFTFSNFGMHWVRQAPGKGLEWVAVIWYDASNENYADAVKGRFTISRDNSKNTLYLQMNSLRAEDTAVYYCARDRTIFGVVLGDYWGQGTLVTVSSASTKGPSVFPLAPSSKSTSGGTAALGCLVKDYFPEPVTVSWNSGALTSGVHTFPAVLQSSGLYSLSSVVTVPSSSLGTQTYICNVNHKPSNTKVDKKVEPKSCDKTHTCPPCPAPELLGGPSVFLFPPKPKDTLMISRTPEVTCVVVDVSHEDPEVKFNWYVDGVEVHNAKTKPCEEQYGSTYRCVSVLTVLHQDWLNGKEYKCKVSNKALPAPIEKTISKAKGQPREPQVYTLPPSREEMTKNQVSLTCLVKGFYPSDIAVEWESNGQPENNYKTTPPVLDSDGSFFLYSKLTVDKSRWQQGNVFSCSVMHEALHNHYTQKSLSLSPGK

SEQ ID NO: 510 - protein, 451 aa, synthetic construct
QVQLVESGGGVVQPGRSLRLSCAASGFTFSNFGMHWVRQAPGKGLEWVAVIWYDASNENYADAVKGRFTISRDNSKNTLYLQMNSLRAEDTAVYYCARDGTIFGVVLGDYWGQGTLVTVSSASTKGPSVFPLAPSSKSTSGGTAALGCLVKDYFPEPVTVSWNSGALTSGVHTFPAVLQSSGLYSLSSVVTVPSSSLGTQTYICNVNHKPSNTKVDKKVEPKSCDKTHTCPPCPAPELLGGPSVFLFPPKPKDTLMISRTPEVTCVVVDVSHEDPEVKFNWYVDGVEVHNAKTKPCEEQYGSTYRCVSVLTVLHQDWLNGKEYKCKVSNKALPAPIEKTISKAKGQPREPQVYTLPPSREEMTKNQVSLTCLVKGFYPSDIAVEWESNGQPENNYKTTPPVLDSDGSFFLYSKLTVDKSRWQQGNVFSCSVMHEALHNHYTQKSLSLSPGK

SEQ ID NO: 511 - protein, 450 aa, synthetic construct
QVQLVESGGGVVQPGRSLRLSCAASGFTFSSYGMHWVRQAPGKGLEWVAVIWYDASNKYYADAVKGRFTISRDNSKNTLYLQMNSLRAEDTAVYYCARDRTIFGVVLDYWGQGTLVTVSSASTKGPSVFPLAPSSKSTSGGTAALGCLVKDYFPEPVTVSWNSGALTSGVHTFPAVLQSSGLYSLSSVVTVPSSSLGTQTYICNVNHKPSNTKVDKKVEPKSCDKTHTCPPCPAPELLGGPSVFLFPPKPKDTLMISRTPEVTCVVVDVSHEDPEVKFNWYVDGVEVHNAKTKPCEEQYGSTYRCVSVLTVLHQDWLNGKEYKCKVSNKALPAPIEKTISKAKGQPREPQVYTLPPSREEMTKNQVSLTCLVKGFYPSDIAVEWESNGQPENNYKTTPPVLDSDGSFFLYSKLTVDKSRWQQGNVFSCSVMHEALHNHYTQKSLSLSPGK

SEQ ID NO: 512 - protein, 450 aa, synthetic construct
QVQLVESGGGVVQPGRSLRLSCAASGFTFSSYGMHWVRQAPGKGLEWVAVIWYDASNKYYADAVKGRFTISSDNSKNTLYLQMNSLRAEDTAVYYCARDRTIFGVVLDYWGQGTLVTVSSASTKGPSVFPLAPSSKSTSGGTAALGCLVKDYFPEPVTVSWNSGALTSGVHTFPAVLQSSGLYSLSSVVTVPSSSLGTQTYICNVNHKPSNTKVDKKVEPKSCDKTHTCPPCPAPELLGGPSVFLFPPKPKDTLMISRTPEVTCVVVDVSHEDPEVKFNWYVDGVEVHNAKTKPCEEQYGSTYRCVSVLTVLHQDWLNGKEYKCKVSNKALPAPIEKTISKAKGQPREPQVYTLPPSREEMTKNQVSLTCLVKGFYPSDIAVEWESNGQPENNYKTTPPVLDSDGSFFLYSKLTVDKSRWQQGNVFSCSVMHEALHNHYTQKSLSLSPGK

SEQ ID NO: 513 - protein, 450 aa, synthetic construct; identical to SEQ ID NO: 511

SEQ ID NO: 514 - protein, 450 aa, synthetic construct; identical to SEQ ID NO: 511

SEQ ID NO: 515 - protein, 450 aa, synthetic construct; identical to SEQ ID NO: 512

SEQ ID NO: 516 - protein, 450 aa, synthetic construct; identical to SEQ ID NO: 512

SEQ ID NO: 517 - protein, 450 aa, synthetic construct; identical to SEQ ID NO: 511

SEQ ID NO: 518 - protein, 450 aa, synthetic construct
QVQLVESGGGVVQPGRSLRLSCAASGFTFSSYGMHWVRQAPGKGLEWVAVIWYDASNKYYADSVKGRFTISRDNSKNTLYLQMNSLRAEDTAVYYCARDRTIFGVVLDYWGQGTLVTVSSASTKGPSVFPLAPSSKSTSGGTAALGCLVKDYFPEPVTVSWNSGALTSGVHTFPAVLQSSGLYSLSSVVTVPSSSLGTQTYICNVNHKPSNTKVDKKVEPKSCDKTHTCPPCPAPELLGGPSVFLFPPKPKDTLMISRTPEVTCVVVDVSHEDPEVKFNWYVDGVEVHNAKTKPCEEQYGSTYRCVSVLTVLHQDWLNGKEYKCKVSNKALPAPIEKTISKAKGQPREPQVYTLPPSREEMTKNQVSLTCLVKGFYPSDIAVEWESNGQPENNYKTTPPVLDSDGSFFLYSKLTVDKSRWQQGNVFSCSVMHEALHNHYTQKSLSLSPGK

SEQ ID NO: 519 - protein, 450 aa, synthetic construct
QVQLVESGGGVVQPGRSLRLSCAASGFTFSSYGMHWVRQAPGKGLEWVAVIWYDGSNKYYADAVKGRFTISRDNSKNTLYLQMNSLRAEDTAVYYCARDRTIFGVVLDYWGQGTLVTVSSASTKGPSVFPLAPSSKSTSGGTAALGCLVKDYFPEPVTVSWNSGALTSGVHTFPAVLQSSGLYSLSSVVTVPSSSLGTQTYICNVNHKPSNTKVDKKVEPKSCDKTHTCPPCPAPELLGGPSVFLFPPKPKDTLMISRTPEVTCVVVDVSHEDPEVKFNWYVDGVEVHNAKTKPCEEQYGSTYRCVSVLTVLHQDWLNGKEYKCKVSNKALPAPIEKTISKAKGQPREPQVYTLPPSREEMTKNQVSLTCLVKGFYPSDIAVEWESNGQPENNYKTTPPVLDSDGSFFLYSKLTVDKSRWQQGNVFSCSVMHEALHNHYTQKSLSLSPGK

SEQ ID NO: 520 - protein, 451 aa, synthetic construct; identical to SEQ ID NO: 486

SEQ ID NO: 521 - protein, 451 aa, synthetic construct; identical to SEQ ID NO: 491

SEQ ID NO: 522 - protein, 451 aa, synthetic construct; identical to SEQ ID NO: 486

SEQ ID NO: 523 - protein, 451 aa, synthetic construct; identical to SEQ ID NO: 491

SEQ ID NO: 524 - protein, 451 aa, synthetic construct; identical to SEQ ID NO: 474

SEQ ID NO: 525 - protein, 451 aa, synthetic construct; identical to SEQ ID NO: 487

SEQ ID NO: 526 - protein, 451 aa, synthetic construct; identical to SEQ ID NO: 488

SEQ ID NO: 527 - protein, 450 aa, synthetic construct
QVQLVESGGGVVQPGRSLRLSCAASGFSFSSYGMHWVRQPPGKGLEWVAAIWYDANNKYYADAVKGRFTISRDSSKNTLYLQMNSLRAEDTAVYYCARDRTIFGVVLEYWGQGTLVTVSSASTKGPSVFPLAPSSKSTSGGTAALGCLVKDYFPEPVTVSWNSGALTSGVHTFPAVLQSSGLYSLSSVVTVPSSSLGTQTYICNVNHKPSNTKVDKKVEPKSCDKTHTCPPCPAPELLGGPSVFLFPPKPKDTLMISRTPEVTCVVVDVSHEDPEVKFNWYVDGVEVHNAKTKPCEEQYGSTYRCVSVLTVLHQDWLNGKEYKCKVSNKALPAPIEKTISKAKGQPREPQVYTLPPSREEMTKNQVSLTCLVKGFYPSDIAVEWESNGQPENNYKTTPPVLDSDGSFFLYSKLTVDKSRWQQGNVFSCSVMHEALHNHYTQKSLSLSPGK

SEQ ID NO: 528 - protein, 450 aa, synthetic construct; identical to SEQ ID NO: 527

SEQ ID NO: 529 - protein, 450 aa, synthetic construct
QVQLVESGGGVVQPGRSLRLSCAASGFSFSSYGMHWVRQPPGKGLEWVAAIWYDANNKYYADAVKGRFTISRDSSKNTLYLQMNSLRAEDTAVYYCARDRTIFGVVLEYLGQGTLVTVSSASTKGPSVFPLAPSSKSTSGGTAALGCLVKDYFPEPVTVSWNSGALTSGVHTFPAVLQSSGLYSLSSVVTVPSSSLGTQTYICNVNHKPSNTKVDKKVEPKSCDKTHTCPPCPAPELLGGPSVFLFPPKPKDTLMISRTPEVTCVVVDVSHEDPEVKFNWYVDGVEVHNAKTKPCEEQYGSTYRCVSVLTVLHQDWLNGKEYKCKVSNKALPAPIEKTISKAKGQPREPQVYTLPPSREEMTKNQVSLTCLVKGFYPSDIAVEWESNGQPENNYKTTPPVLDSDGSFFLYSKLTVDKSRWQQGNVFSCSVMHEALHNHYTQKSLSLSPGK

SEQ ID NO: 530 - protein, 450 aa, synthetic construct; identical to SEQ ID NO: 527

SEQ ID NO: 531 - protein, 450 aa, synthetic construct; identical to SEQ ID NO: 529

SEQ ID NO: 532 - protein, 450 aa, synthetic construct; identical to SEQ ID NO: 529

SEQ ID NO: 533 - protein, 450 aa, synthetic construct; identical to SEQ ID NO: 527

SEQ ID NO: 534 - protein, 450 aa, synthetic construct
QVQLVESGGGVVQPGRSLRLSCAASGFSFSSYGMHWVRQPPGKGLEWVAAIWYDGNNKYYADAVKGRFTISRDSSKNTLYLQMNSLRAEDTAVYYCARDRTIFGVVLEYWGQGTLVTVSSASTKGPSVFPLAPSSKSTSGGTAALGCLVKDYFPEPVTVSWNSGALTSGVHTFPAVLQSSGLYSLSSVVTVPSSSLGTQTYICNVNHKPSNTKVDKKVEPKSCDKTHTCPPCPAPELLGGPSVFLFPPKPKDTLMISRTPEVTCVVVDVSHEDPEVKFNWYVDGVEVHNAKTKPCEEQYGSTYRCVSVLTVLHQDWLNGKEYKCKVSNKALPAPIEKTISKAKGQPREPQVYTLPPSREEMTKNQVSLTCLVKGFYPSDIAVEWESNGQPENNYKTTPPVLDSDGSFFLYSKLTVDKSRWQQGNVFSCSVMHEALHNHYTQKSLSLSPGK

SEQ ID NO: 535 - protein, 450 aa, synthetic construct
QVQLVESGGGVVQPGRSLRLSCAASGFSFSSYGMHWVRQPPGKGLEWVAAIWYDANNKYYADSVKGRFTISRDSSKNTLYLQMNSLRAEDTAVYYCARDRTIFGVVLEYWGQGTLVTVSSASTKGPSVFPLAPSSKSTSGGTAALGCLVKDYFPEPVTVSWNSGALTSGVHTFPAVLQSSGLYSLSSVVTVPSSSLGTQTYICNVNHKPSNTKVDKKVEPKSCDKTHTCPPCPAPELLGGPSVFLFPPKPKDTLMISRTPEVTCVVVDVSHEDPEVKFNWYVDGVEVHNAKTKPCEEQYGSTYRCVSVLTVLHQDWLNGKEYKCKVSNKALPAPIEKTISKAKGQPREPQVYTLPPSREEMTKNQVSLTCLVKGFYPSDIAVEWESNGQPENNYKTTPPVLDSDGSFFLYSKLTVDKSRWQQGNVFSCSVMHEALHNHYTQKSLSLSPGK

SEQ ID NO: 536 - protein, 450 aa, synthetic construct; identical to SEQ ID NO: 527

SEQ ID NO: 537 - protein, 450 aa, synthetic construct; identical to SEQ ID NO: 529

SEQ ID NO: 538 - protein, 450 aa, synthetic construct
QVQLVESGGGVVQPGRSLRLSCAASGFSFSSYGMHWVRQAPGKGLEWVAVIWYDASNKYYEDAVKGRFTISRDNSKNTLFLQVNSLRAEDTAVYYCARGITIFGHGFEYWGQGTLVTVSSASTKGPSVFPLAPSSKSTSGGTAALGCLVKDYFPEPVTVSWNSGALTSGVHTFPAVLQSSGLYSLSSVVTVPSSSLGTQTYICNVNHKPSNTKVDKKVEPKSCDKTHTCPPCPAPELLGGPSVFLFPPKPKDTLMISRTPEVTCVVVDVSHEDPEVKFNWYVDGVEVHNAKTKPCEEQYGSTYRCVSVLTVLHQDWLNGKEYKCKVSNKALPAPIEKTISKAKGQPREPQVYTLPPSREEMTKNQVSLTCLVKGFYPSDIAVEWESNGQPENNYKTTPPVLDSDGSFFLYSKLTVDKSRWQQGNVFSCSVMHEALHNHYTQKSLSLSPGK

SEQ ID NO: 539 - protein, 450 aa, synthetic construct
QVQLVESGGGVVQPGRSLRLSCAASGFSFSSYGMHWVRQAPGKGLEWVAVIWYDGSNKYYEDSVKGRFTISRDNSKNTLFLQVNSLRAEDTAVYYCARGITIFGHGFEYWGQGTLVTVSSASTKGPSVFPLAPSSKSTSGGTAALGCLVKDYFPEPVTVSWNSGALTSGVHTFPAVLQSSGLYSLSSVVTVPSSSLGTQTYICNVNHKPSNTKVDKKVEPKSCDKTHTCPPCPAPELLGGPSVFLFPPKPKDTLMISRTPEVTCVVVDVSHEDPEVKFNWYVDGVEVHNAKTKPCEEQYGSTYRCVSVLTVLHQDWLNGKEYKCKVSNKALPAPIEKTISKAKGQPREPQVYTLPPSREEMTKNQVSLTCLVKGFYPSDIAVEWESNGQPENNYKTTPPVLDSDGSFFLYSKLTVDKSRWQQGNVFSCSVMHEALHNHYTQKSLSLSPGK

SEQ ID NO: 540 - protein, 450 aa, synthetic construct
QVQLVESGGGVVQPGRSLRLSCAASGFSFSSYGMHWVRQAPGKGLEWVAVIWYDGSNKYYEDAVKGRFTISRDNSKNTLFLQVNSLRAEDTAVYYCARGITIFGHGFEYWGQGTLVTVSSASTKGPSVFPLAPSSKSTSGGTAALGCLVKDYFPEPVTVSWNSGALTSGVHTFPAVLQSSGLYSLSSVVTVPSSSLGTQTYICNVNHKPSNTKVDKKVEPKSCDKTHTCPPCPAPELLGGPSVFLFPPKPKDTLMISRTPEVTCVVVDVSHEDPEVKFNWYVDGVEVHNAKTKPCEEQYGSTYRCVSVLTVLHQDWLNGKEYKCKVSNKALPAPIEKTISKAKGQPREPQVYTLPPSREEMTKNQVSLTCLVKGFYPSDIAVEWESNGQPENNYKTTPPVLDSDGSFFLYSKLTVDKSRWQQGNVFSCSVMHEALHNHYTQKSLSLSPGK

SEQ ID NO: 541 - protein, 450 aa, synthetic construct
QVQLVESGGGVVQPGRSLRLSCAASGFSFSSYGMHWVRQAPGKGLEWVAVIWYDASNKYYEDSVKGRFTISRDNSKNTLFLQVNSLRAEDTAVYYCARGITIFGHGFEYWGQGTLVTVSSASTKGPSVFPLAPSSKSTSGGTAALGCLVKDYFPEPVTVSWNSGALTSGVHTFPAVLQSSGLYSLSSVVTVPSSSLGTQTYICNVNHKPSNTKVDKKVEPKSCDKTHTCPPCPAPELLGGPSVFLFPPKPKDTLMISRTPEVTCVVVDVSHEDPEVKFNWYVDGVEVHNAKTKPCEEQYGSTYRCVSVLTVLHQDWLNGKEYKCKVSNKALPAPIEKTISKAKGQPREPQVYTLPPSREEMTKNQVSLTCLVKGFYPSDIAVEWESNGQPENNYKTTPPVLDSDGSFFLYSKLTVDKSRWQQGNVFSCSVMHEALHNHYTQKSLSLSPGK

SEQ ID NO: 542 - protein, 450 aa, synthetic construct
QVQLVESGGGVVQPGRSLRLSCAASGFTFSNYGMHWVRQAPGEGLEWVAAIWFDASDKYYADAVKGRFTISRDNSKNTLYLQMNSLRAEDTAVYYCARDQAIFGVVPDYWGQGTLVTVSSASTKGPSVFPLAPSSKSTSGGTAALGCLVKDYFPEPVTVSWNSGALTSGVHTFPAVLQSSGLYSLSSVVTVPSSSLGTQTYICNVNHKPSNTKVDKKVEPKSCDKTHTCPPCPAPELLGGPSVFLFPPKPKDTLMISRTPEVTCVVVDVSHEDPEVKFNWYVDGVEVHNAKTKPCEEQYGSTYRCVSVLTVLHQDWLNGKEYKCKVSNKALPAPIEKTISKAKGQPREPQVYTLPPSREEMTKNQVSLTCLVKGFYPSDIAVEWESNGQPENNYKTTPPVLDSDGSFFLYSKLTVDKSRWQQGNVFSCSVMHEALHNHYTQKSLSLSPGK

SEQ ID NO: 543 - protein, 450 aa, synthetic construct
QVQLVESGGGVVQPGRSLRLSCAASGFTFSNYGMHWVRQAPGEGLEWVAAIWFDASDKYYADSVKGRFTISRDNSKNTLYLQMNSLRAEDTAVYYCARDQAIFGVVPDYWGQGTLVTVSSASTKGPSVFPLAPSSKSTSGGTAALGCLVKDYFPEPVTVSWNSGALTSGVHTFPAVLQSSGLYSLSSVVTVPSSSLGTQTYICNVNHKPSNTKVDKKVEPKSCDKTHTCPPCPAPELLGGPSVFLFPPKPKDTLMISRTPEVTCVVVDVSHEDPEVKFNWYVDGVEVHNAKTKPCEEQYGSTYRCVSVLTVLHQDWLNGKEYKCKVSNKALPAPIEKTISKAKGQPREPQVYTLPPSREEMTKNQVSLTCLVKGFYPSDIAVEWESNGQPENNYKTTPPVLDSDGSFFLYSKLTVDKSRWQQGNVFSCSVMHEALHNHYTQKSLSLSPGK

SEQ ID NO: 544 - protein, 450 aa, synthetic construct
QVQLVESGGGVVQPGRSLRLSCAASGFTFSNYGMHWVRQAPGEGLEWVAAIWFDGSDKYYADAVKGRFTISRDNSKNTLYLQMNSLRAEDTAVYYCARDQAIFGVVPDYWGQGTLVTVSSASTKGPSVFPLAPSSKSTSGGTAALGCLVKDYFPEPVTVSWNSGALTSGVHTFPAVLQSSGLYSLSSVVTVPSSSLGTQTYICNVNHKPSNTKVDKKVEPKSCDKTHTCPPCPAPELLGGPSVFLFPPKPKDTLMISRTPEVTCVVVDVSHEDPEVKFNWYVDGVEVHNAKTKPCEEQYGSTYRCVSVLTVLHQDWLNGKEYKCKVSNKALPAPIEKTISKAKGQPREPQVYTLPPSREEMTKNQVSLTCLVKGFYPSDIAVEWESNGQPENNYKTTPPVLDSDGSFFLYSKLTVDKSRWQQGNVFSCSVMHEALHNHYTQKSLSLSPGK

SEQ ID NO: 545 - protein, 450 aa, synthetic construct; identical to SEQ ID NO: 542

SEQ ID NO: 546 - protein, 450 aa, synthetic construct
QVQLVESGGGVVQPGRSLRLSCAASGFTFSNYGMHWVRQAPGKGLEWVAAIWFDASDKYYADAVKGRFTISRDNSKNTLYLQMNSLRAEDTAVYYCARDQAIFGVVPDYWGQGTLVTVSSASTKGPSVFPLAPSSKSTSGGTAALGCLVKDYFPEPVTVSWNSGALTSGVHTFPAVLQSSGLYSLSSVVTVPSSSLGTQTYICNVNHKPSNTKVDKKVEPKSCDKTHTCPPCPAPELLGGPSVFLFPPKPKDTLMISRTPEVTCVVVDVSHEDPEVKFNWYVDGVEVHNAKTKPCEEQYGSTYRCVSVLTVLHQDWLNGKEYKCKVSNKALPAPIEKTISKAKGQPREPQVYTLPPSREEMTKNQVSLTCLVKGFYPSDIAVEWESNGQPENNYKTTPPVLDSDGSFFLYSKLTVDKSRWQQGNVFSCSVMHEALHNHYTQKSLSLSPGK

SEQ ID NO: 547 - protein, 450 aa, synthetic construct; identical to SEQ ID NO: 546

SEQ ID NO: 548 - protein, 450 aa, synthetic construct; identical to SEQ ID NO: 542

SEQ ID NO: 549 - protein, 450 aa, synthetic construct; identical to SEQ ID NO: 546

SEQ ID NO: 550 - protein, 456 aa, synthetic construct
QVQLQESGPGLVKPSETLSLTCTVSGDSISSGGYYWSWIRQPPGKGLEWIGYIYYSGSTYYNPSLKSRVTISVDTSKNQFSLKLSSVTAADTAVYYCARDRITIFGVVMGGGMDVWGQGTTVTVSSASTKGPSVFPLAPSSKSTSGGTAALGCLVKDYFPEPVTVSWNSGALTSGVHTFPAVLQSSGLYSLSSVVTVPSSSLGTQTYICNVNHKPSNTKVDKKVEPKSCDKTHTCPPCPAPELLGGPSVFLFPPKPKDTLMISRTPEVTCVVVDVSHEDPEVKFNWYVDGVEVHNAKTKPCEEQYGSTYRCVSVLTVLHQDWLNGKEYKCKVSNKALPAPIEKTISKAKGQPREPQVYTLPPSREEMTKNQVSLTCLVKGFYPSDIAVEWESNGQPENNYKTTPPVLDSDGSFFLYSKLTVDKSRWQQGNVFSCSVMHEALHNHYTQKSLSLSPGK

SEQ ID NO: 551 - protein, 456 aa, synthetic construct; identical to SEQ ID NO: 550

SEQ ID NO: 552 - protein, 456 aa, synthetic construct
QVQLQESGPGLVKPSQTLSLTCTVSGDSISSGGYYWSWIRQPPGKGLEWIGYIYYSGSTYYNPSLKSRVTISVDTSKNQFSLKLSSVTAADTAVYYCARDRITIFGVVMGGGMDVWGQGTTVTVSSASTKGPSVFPLAPSSKSTSGGTAALGCLVKDYFPEPVTVSWNSGALTSGVHTFPAVLQSSGLYSLSSVVTVPSSSLGTQTYICNVNHKPSNTKVDKKVEPKSCDKTHTCPPCPAPELLGGPSVFLFPPKPKDTLMISRTPEVTCVVVDVSHEDPEVKFNWYVDGVEVHNAKTKPCEEQYGSTYRCVSVLTVLHQDWLNGKEYKCKVSNKALPAPIEKTISKAKGQPREPQVYTLPPSREEMTKNQVSLTCLVKGFYPSDIAVEWESNGQPENNYKTTPPVLDSDGSFFLYSKLTVDKSRWQQGNVFSCSVMHEALHNHYTQKSLSLSPGK

SEQ ID NO: 553 - protein, 456 aa, synthetic construct
QVQLQESGPGLVKPSETLSLTCTVSGDSISSGGYYWSWIRQHPGKGLEWIGYIYYSGSTYYNPSLKSRVTISVDTSKNQFSLKLSSVTAADTAVYYCARDRITIFGVVMGGGMDVWGQGTTVTVSSASTKGPSVFPLAPSSKSTSGGTAALGCLVKDYFPEPVTVSWNSGALTSGVHTFPAVLQSSGLYSLSSVVTVPSSSLGTQTYICNVNHKPSNTKVDKKVEPKSCDKTHTCPPCPAPELLGGPSVFLFPPKPKDTLMISRTPEVTCVVVDVSHEDPEVKFNWYVDGVEVHNAKTKPCEEQYGSTYRCVSVLTVLHQDWLNGKEYKCKVSNKALPAPIEKTISKAKGQPREPQVYTLPPSREEMTKNQVSLTCLVKGFYPSDIAVEWESNGQPENNYKTTPPVLDSDGSFFLYSKLTVDKSRWQQGNVFSCSVMHEALHNHYTQKSLSLSPGK

SEQ ID NO: 554 - protein, 456 aa, synthetic construct; identical to SEQ ID NO: 480

SEQ ID NO: 555 - protein, 456 aa, synthetic construct; identical to SEQ ID NO: 553

SEQ ID NO: 556 - protein, 456 aa, synthetic construct; identical to SEQ ID NO: 552

SEQ ID NO: 557 - protein, 453 aa, synthetic construct
QVQLVQSGAEVKKPGASVKVSCKASGYTFTGYYIHWVRQAPGQGLEWMGWINPESGGTDYSQRFQGRVTMTRDTSISTAYMELNRLRSDDTAVYYCAREATIFGMVIVPFDYWGQGTLVTVSSASTKGPSVFPLAPSSKSTSGGTAALGCLVKDYFPEPVTVSWNSGALTSGVHTFPAVLQSSGLYSLSSVVTVPSSSLGTQTYICNVNHKPSNTKVDKKVEPKSCDKTHTCPPCPAPELLGGPSVFLFPPKPKDTLMISRTPEVTCVVVDVSHEDPEVKFNWYVDGVEVHNAKTKPCEEQYGSTYRCVSVLTVLHQDWLNGKEYKCKVSNKALPAPIEKTISKAKGQPREPQVYTLPPSREEMTKNQVSLTCLVKGFYPSDIAVEWESNGQPENNYKTTPPVLDSDGSFFLYSKLTVDKSRWQQGNVFSCSVMHEALHNHYTQKSLSLSPGK

SEQ ID NO: 558 - protein, 453 aa, synthetic construct
QVPLVQSGAEVKKPGASVKVSCKASGYTFTGYYIHWVRQAPGQGLEWMGWINPESGGTDYSQRFQGRFTMTRDTSISTAYMELNRLRSDDTAVYYCAREATIFGMVIVPFDYWGQGTLVTVSSASTKGPSVFPLAPSSKSTSGGTAALGCLVKDYFPEPVTVSWNSGALTSGVHTFPAVLQSSGLYSLSSVVTVPSSSLGTQTYICNVNHKPSNTKVDKKVEPKSCDKTHTCPPCPAPELLGGPSVFLFPPKPKDTLMISRTPEVTCVVVDVSHEDPEVKFNWYVDGVEVHNAKTKPCEEQYGSTYRCVSVLTVLHQDWLNGKEYKCKVSNKALPAPIEKTISKAKGQPREPQVYTLPPSREEMTKNQVSLTCLVKGFYPSDIAVEWESNGQPENNYKTTPPVLDSDGSFFLYSKLTVDKSRWQQGNVFSCSVMHEALHNHYTQKSLSLSPGK

SEQ ID NO: 559 - protein, 453 aa, synthetic construct
QVQLVQSGAEVKKPGASVKVSCKASGYTFTGYYIHWVRQAPGQGLEWMGWINPDAGGTDYSQRFQGRVTMTRDTSISTAYMELNRLRSDDTAVYYCAREATIFGMVIVPFDYWGQGTLVTVSSASTKGPSVFPLAPSSKSTSGGTAALGCLVKDYFPEPVTVSWNSGALTSGVHTFPAVLQSSGLYSLSSVVTVPSSSLGTQTYICNVNHKPSNTKVDKKVEPKSCDKTHTCPPCPAPELLGGPSVFLFPPKPKDTLMISRTPEVTCVVVDVSHEDPEVKFNWYVDGVEVHNAKTKPCEEQYGSTYRCVSVLTVLHQDWLNGKEYKCKVSNKALPAPIEKTISKAKGQPREPQVYTLPPSREEMTKNQVSLTCLVKGFYPSDIAVEWESNGQPENNYKTTPPVLDSDGSFFLYSKLTVDKSRWQQGNVFSCSVMHEALHNHYTQKSLSLSPGK

SEQ ID NO: 560 - protein, 453 aa, synthetic construct
QVPLVQSGAEVKKPGASVKVSCKASGYTFTGYYIHWVRQAPGQGLEWMGWINPDAGGTDYSQRFQGRFTMTRDTSISTAYMELNRLRSDDTAVYYCAREATIFGMVIVPFDYWGQGTLVTVSSASTKGPSVFPLAPSSKSTSGGTAALGCLVKDYFPEPVTVSWNSGALTSGVHTFPAVLQSSGLYSLSSVVTVPSSSLGTQTYICNVNHKPSNTKVDKKVEPKSCDKTHTCPPCPAPELLGGPSVFLFPPKPKDTLMISRTPEVTCVVVDVSHEDPEVKFNWYVDGVEVHNAKTKPCEEQYGSTYRCVSVLTVLHQDWLNGKEYKCKVSNKALPAPIEKTISKAKGQPREPQVYTLPPSREEMTKNQVSLTCLVKGFYPSDIAVEWESNGQPENNYKTTPPVLDSDGSFFLYSKLTVDKSRWQQGNVFSCSVMHEALHNHYTQKSLSLSPGK

SEQ ID NO: 561 - protein, 453 aa, synthetic construct
QVQLVQSGAEVKKPGASVKVSCKASGYTFTGYYIHWVRQAPGQGLEWMGWINPDSGGTDYSQRFQGRVTMTRDTSISTAYMELNRLRSDDTAVYYCAREATIFGMVIVPFDYWGQGTLVTVSSASTKGPSVFPLAPSSKSTSGGTAALGCLVKDYFPEPVTVSWNSGALTSGVHTFPAVLQSSGLYSLSSVVTVPSSSLGTQTYICNVNHKPSNTKVDKKVEPKSCDKTHTCPPCPAPELLGGPSVFLFPPKPKDTLMISRTPEVTCVVVDVSHEDPEVKFNWYVDGVEVHNAKTKPCEEQYGSTYRCVSVLTVLHQDWLNGKEYKCKVSNKALPAPIEKTISKAKGQPREPQVYTLPPSREEMTKNQVSLTCLVKGFYPSDIAVEWESNGQPENNYKTTPPVLDSDGSFFLYSKLTVDKSRWQQGNVFSCSVMHEALHNHYTQKSLSLSPGK

SEQ ID NO: 562 - protein, 453 aa, synthetic construct
QVQLVQSGAEVKKPGASVKVSCKASGYTFTGYYIHWVRQAPGQGLEWMGWINPDSGGTDYSQRFQGRFTMTRDTSISTAYMELNRLRSDDTAVYYCAREATIFGMVIVPFDYWGQGTLVTVSSASTKGPSVFPLAPSSKSTSGGTAALGCLVKDYFPEPVTVSWNSGALTSGVHTFPAVLQSSGLYSLSSVVTVPSSSLGTQTYICNVNHKPSNTKVDKKVEPKSCDKTHTCPPCPAPELLGGPSVFLFPPKPKDTLMISRTPEVTCVVVDVSHEDPEVKFNWYVDGVEVHNAKTKPCEEQYGSTYRCVSVLTVLHQDWLNGKEYKCKVSNKALPAPIEKTISKAKGQPREPQVYTLPPSREEMTKNQVSLTCLVKGFYPSDIAVEWESNGQPENNYKTTPPVLDSDGSFFLYSKLTVDKSRWQQGNVFSCSVMHEALHNHYTQKSLSLSPGK

SEQ ID NO: 563 - protein, 453 aa, synthetic construct
QVPLVQSGAEVKKPGASVKVSCKASGYTFTGYYIHWVRQAPGQGLEWMGWINPDSGGTDYSQRFQGRVTMTRDTSISTAYMELNRLRSDDTAVYYCAREATIFGMVIVPFDYWGQGTLVTVSSASTKGPSVFPLAPSSKSTSGGTAALGCLVKDYFPEPVTVSWNSGALTSGVHTFPAVLQSSGLYSLSSVVTVPSSSLGTQTYICNVNHKPSNTKVDKKVEPKSCDKTHTCPPCPAPELLGGPSVFLFPPKPKDTLMISRTPEVTCVVVDVSHEDPEVKFNWYVDGVEVHNAKTKPCEEQYGSTYRCVSVLTVLHQDWLNGKEYKCKVSNKALPAPIEKTISKAKGQPREPQVYTLPPSREEMTKNQVSLTCLVKGFYPSDIAVEWESNGQPENNYKTTPPVLDSDGSFFLYSKLTVDKSRWQQGNVFSCSVMHEALHNHYTQKSLSLSPGK

SEQ ID NO: 564 - protein, 453 aa, synthetic construct
QVQLVQSGAEVKKPGASVKVSCKASGYTFTGYYIHWVRQAPGQGLEWMGWINPDAGGTDYSQRFQGRFTMTRDTSISTAYMELNRLRSDDTAVYYCAREATIFGMVIVPFDYWGQGTLVTVSSASTKGPSVFPLAPSSKSTSGGTAALGCLVKDYFPEPVTVSWNSGALTSGVHTFPAVLQSSGLYSLSSVVTVPSSSLGTQTYICNVNHKPSNTKVDKKVEPKSCDKTHTCPPCPAPELLGGPSVFLFPPKPKDTLMISRTPEVTCVVVDVSHEDPEVKFNWYVDGVEVHNAKTKPCEEQYGSTYRCVSVLTVLHQDWLNGKEYKCKVSNKALPAPIEKTISKAKGQPREPQVYTLPPSREEMTKNQVSLTCLVKGFYPSDIAVEWESNGQPENNYKTTPPVLDSDGSFFLYSKLTVDKSRWQQGNVFSCSVMHEALHNHYTQKSLSLSPGK

SEQ ID NO: 565 - protein, 453 aa, synthetic construct
QVPLVQSGAEVKKPGASVKVSCKASGYTFTGYYIHWVRQAPGQGLEWMGWINPDAGGTDYSQRFQGRVTMTRDTSISTAYMELNRLRSDDTAVYYCAREATIFGMVIVPFDYWGQGTLVTVSSASTKGPSVFPLAPSSKSTSGGTAALGCLVKDYFPEPVTVSWNSGALTSGVHTFPAVLQSSGLYSLSSVVTVPSSSLGTQTYICNVNHKPSNTKVDKKVEPKSCDKTHTCPPCPAPELLGGPSVFLFPPKPKDTLMISRTPEVTCVVVDVSHEDPEVKFNWYVDGVEVHNAKTKPCEEQYGSTYRCVSVLTVLHQDWLNGKEYKCKVSNKALPAPIEKTISKAKGQPREPQVYTLPPSREEMTKNQVSLTCLVKGFYPSDIAVEWESNGQPENNYKTTPPVLDSDGSFFLYSKLTVDKSRWQQGNVFSCSVMHEALHNHYTQKSLSLSPGK

SEQ ID NO: 566 - protein, 453 aa, synthetic construct
QVQLVQSGAEVKKPGASVKVSCKASGYTFTGYYIHWVRQAPGQGLEWMGWINPDAGGTDYSQRFQGRVTMTRDTSISTAYMELNSLRSDDTAVYYCAREATIFGMVIVPFDYWGQGTLVTVSSASTKGPSVFPLAPSSKSTSGGTAALGCLVKDYFPEPVTVSWNSGALTSGVHTFPAVLQSSGLYSLSSVVTVPSSSLGTQTYICNVNHKPSNTKVDKKVEPKSCDKTHTCPPCPAPELLGGPSVFLFPPKPKDTLMISRTPEVTCVVVDVSHEDPEVKFNWYVDGVEVHNAKTKPCEEQYGSTYRCVSVLTVLHQDWLNGKEYKCKVSNKALPAPIEKTISKAKGQPREPQVYTLPPSREEMTKNQVSLTCLVKGFYPSDIAVEWESNGQPENNYKTTPPVLDSDGSFFLYSKLTVDKSRWQQGNVFSCSVMHEALHNHYTQKSLSLSPGK

SEQ ID NO: 567 - protein, 453 aa, synthetic construct
QVQLVQSGAEVKKPGASVKVSCKASGYTFTGYYIHWVRQAPGQGLEWMGWINPESGGTDYSQRFQGRVTMTRDTSISTAYMELNSLRSDDTAVYYCAREATIFGMVIVPFDYWGQGTLVTVSSASTKGPSVFPLAPSSKSTSGGTAALGCLVKDYFPEPVTVSWNSGALTSGVHTFPAVLQSSGLYSLSSVVTVPSSSLGTQTYICNVNHKPSNTKVDKKVEPKSCDKTHTCPPCPAPELLGGPSVFLFPPKPKDTLMISRTPEVTCVVVDVSHEDPEVKFNWYVDGVEVHNAKTKPCEEQYGSTYRCVSVLTVLHQDWLNGKEYKCKVSNKALPAPIEKTISKAKGQPREPQVYTLPPSREEMTKNQVSLTCLVKGFYPSDIAVEWESNGQPENNYKTTPPVLDSDGSFFLYSKLTVDKSRWQQGNVFSCSVMHEALHNHYTQKSLSLSPGK

SEQ ID NO: 568 - protein, 453 aa, synthetic construct
QVPLVQSGAEVKKPGASVKVSCKASGYTFTGYYIHWVRQAPGQGLVWMGWISPNSGETSYAQKFQDRVTMTRDTSISTAYMELSRLRSDDTAVYFCAREATIFGMLIVPFDYWGQGTLVTVSSASTKGPSVFPLAPSSKSTSGGTAALGCLVKDYFPEPVTVSWNSGALTSGVHTFPAVLQSSGLYSLSSVVTVPSSSLGTQTYICNVNHKPSNTKVDKKVEPKSCDKTHTCPPCPAPELLGGPSVFLFPPKPKDTLMISRTPEVTCVVVDVSHEDPEVKFNWYVDGVEVHNAKTKPCEEQYGSTYRCVSVLTVLHQDWLNGKEYKCKVSNKALPAPIEKTISKAKGQPREPQVYTLPPSREEMTKNQVSLTCLVKGFYPSDIAVEWESNGQPENNYKTTPPVLDSDGSFFLYSKLTVDKSRWQQGNVFSCSVMHEALHNHYTQKSLSLSPGK

SEQ ID NO: 569 - protein, 453 aa, synthetic construct
QVPLVQSGAEVKKPGASVKVSCKASGYTFTGYYIHWVRQAPGQGLVWMGWISPNSGDTSYAQKFQDRVTMTRDTSISTAYMELSRLRSDDTAVYFCAREATIFGMLIVPFDYWGQGTLVTVSSASTKGPSVFPLAPSSKSTSGGTAALGCLVKDYFPEPVTVSWNSGALTSGVHTFPAVLQSSGLYSLSSVVTVPSSSLGTQTYICNVNHKPSNTKVDKKVEPKSCDKTHTCPPCPAPELLGGPSVFLFPPKPKDTLMISRTPEVTCVVVDVSHEDPEVKFNWYVDGVEVHNAKTKPCEEQYGSTYRCVSVLTVLHQDWLNGKEYKCKVSNKALPAPIEKTISKAKGQPREPQVYTLPPSREEMTKNQVSLTCLVKGFYPSDIAVEWESNGQPENNYKTTPPVLDSDGSFFLYSKLTVDKSRWQQGNVFSCSVMHEALHNHYTQKSLSLSPGK

SEQ ID NO: 570 - protein, 453 aa, synthetic construct; identical to SEQ ID NO: 568

SEQ ID NO: 571 - protein, 453 aa, synthetic construct
QVPLVQSGAEVKKPGASVKVSCKASGYTFTGYYIHWVRQAPGQGLVWMGWISPNSGETSYAQKFQDRVTMTRDTSISTAYMELSRLRSDDTAVYFCTREATIFGMLIVPFDYWGQGTLVTVSSASTKGPSVFPLAPSSKSTSGGTAALGCLVKDYFPEPVTVSWNSGALTSGVHTFPAVLQSSGLYSLSSVVTVPSSSLGTQTYICNVNHKPSNTKVDKKVEPKSCDKTHTCPPCPAPELLGGPSVFLFPPKPKDTLMISRTPEVTCVVVDVSHEDPEVKFNWYVDGVEVHNAKTKPCEEQYGSTYRCVSVLTVLHQDWLNGKEYKCKVSNKALPAPIEKTISKAKGQPREPQVYTLPPSREEMTKNQVSLTCLVKGFYPSDIAVEWESNGQPENNYKTTPPVLDSDGSFFLYSKLTVDKSRWQQGNVFSCSVMHEALHNHYTQKSLSLSPGK

SEQ ID NO: 572 - protein, 453 aa, synthetic construct; identical to SEQ ID NO: 478

SEQ ID NO: 573 - protein, 453 aa, synthetic construct; identical to SEQ ID NO: 571

SEQ ID NO: 574 - protein, 453 aa, synthetic construct; identical to SEQ ID NO: 569

SEQ ID NO: 575 - protein, 453 aa, synthetic construct
QVQLVQSGAEVKKPGASVKVSCKASGYTFTGYYIHWVRQAPGQGLEWMGWISPNSGETSYAQKFQDRVTMTRDTSISTAYMELSSLRSDDTAVYFCAREATIFGMLIVPFDYWGQGTLVTVSSASTKGPSVFPLAPSSKSTSGGTAALGCLVKDYFPEPVTVSWNSGALTSGVHTFPAVLQSSGLYSLSSVVTVPSSSLGTQTYICNVNHKPSNTKVDKKVEPKSCDKTHTCPPCPAPELLGGPSVFLFPPKPKDTLMISRTPEVTCVVVDVSHEDPEVKFNWYVDGVEVHNAKTKPCEEQYGSTYRCVSVLTVLHQDWLNGKEYKCKVSNKALPAPIEKTISKAKGQPREPQVYTLPPSREEMTKNQVSLTCLVKGFYPSDIAVEWESNGQPENNYKTTPPVLDSDGSFFLYSKLTVDKSRWQQGNVFSCSVMHEALHNHYTQKSLSLSPGK

SEQ ID NO: 576 - protein, 453 aa, synthetic construct
QVQLVQSGAEVKKPGASVKVSCKASGYTFTGYYIHWVRQAPGQGLEWMGWISPNSGETSYAQKFQDRVTMTRDTSISTAYMELSRLRSDDTAVYFCAREATIFGMLIVPFDYWGQGTLVTVSSASTKGPSVFPLAPSSKSTSGGTAALGCLVKDYFPEPVTVSWNSGALTSGVHTFPAVLQSSGLYSLSSVVTVPSSSLGTQTYICNVNHKPSNTKVDKKVEPKSCDKTHTCPPCPAPELLGGPSVFLFPPKPKDTLMISRTPEVTCVVVDVSHEDPEVKFNWYVDGVEVHNAKTKPCEEQYGSTYRCVSVLTVLHQDWLNGKEYKCKVSNKALPAPIEKTISKAKGQPREPQVYTLPPSREEMTKNQVSLTCLVKGFYPSDIAVEWESNGQPENNYKTTPPVLDSDGSFFLYSKLTVDKSRWQQGNVFSCSVMHEALHNHYTQKSLSLSPGK

SEQ ID NO: 577 - protein, 453 aa, synthetic construct
QVPLVQSGAEVKKPGASVKVSCKASGYTFTGYYIHWVRQAPGQGLEWMGWINPESGGTDYSQRFQGRVTMTRDTSISTAYMELSRLRSDDTAVYYCAREATIFGMVIVPFDYWGQGTLVTVSSASTKGPSVFPLAPSSKSTSGGTAALGCLVKDYFPEPVTVSWNSGALTSGVHTFPAVLQSSGLYSLSSVVTVPSSSLGTQTYICNVNHKPSNTKVDKKVEPKSCDKTHTCPPCPAPELLGGPSVFLFPPKPKDTLMISRTPEVTCVVVDVSHEDPEVKFNWYVDGVEVHNAKTKPCEEQYGSTYRCVSVLTVLHQDWLNGKEYKCKVSNKALPAPIEKTISKAKGQPREPQVYTLPPSREEMTKNQVSLTCLVKGFYPSDIAVEWESNGQPENNYKTTPPVLDSDGSFFLYSKLTVDKSRWQQGNVFSCSVMHEALHNHYTQKSLSLSPGK

SEQ ID NO: 578 - protein, 453 aa, synthetic construct
QVPLVQSGAEVKKPGASVKVSCKASGYTFTGYYIHWVRQAPGQGLEWMGWINPESGGTDYSQRFQGRFTMTRDTSISTAYMELSRLRSDDTAVYYCAREATIFGMVIVPFDYWGQGTLVTVSSASTKGPSVFPLAPSSKSTSGGTAALGCLVKDYFPEPVTVSWNSGALTSGVHTFPAVLQSSGLYSLSSVVTVPSSSLGTQTYICNVNHKPSNTKVDKKVEPKSCDKTHTCPPCPAPELLGGPSVFLFPPKPKDTLMISRTPEVTCVVVDVSHEDPEVKFNWYVDGVEVHNAKTKPCEEQYGSTYRCVSVLTVLHQDWLNGKEYKCKVSNKALPAPIEKTISKAKGQPREPQVYTLPPSREEMTKNQVSLTCLVKGFYPSDIAVEWESNGQPENNYKTTPPVLDSDGSFFLYSKLTVDKSRWQQGNVFSCSVMHEALHNHYTQKSLSLSPGK

SEQ ID NO: 579 - protein, 453 aa, synthetic construct
QVPLVQSGAEVKKPGASVKVSCKASGYTFTGYYIHWVRQAPGQGLEWMGWINPDSGGTDYSQRFQGRVTMTRDTSISTAYMELSRLRSDDTAVYYCAREATIFGMVIVPFDYWGQGTLVTVSSASTKGPSVFPLAPSSKSTSGGTAALGCLVKDYFPEPVTVSWNSGALTSGVHTFPAVLQSSGLYSLSSVVTVPSSSLGTQTYICNVNHKPSNTKVDKKVEPKSCDKTHTCPPCPAPELLGGPSVFLFPPKPKDTLMISRTPEVTCVVVDVSHEDPEVKFNWYVDGVEVHNAKTKPCEEQYGSTYRCVSVLTVLHQDWLNGKEYKCKVSNKALPAPIEKTISKAKGQPREPQVYTLPPSREEMTKNQVSLTCLVKGFYPSDIAVEWESNGQPENNYKTTPPVLDSDGSFFLYSKLTVDKSRWQQGNVFSCSVMHEALHNHYTQKSLSLSPGK

SEQ ID NO: 580 - protein, 453 aa, synthetic construct
QVQLVQSGAEVKKPGASVKVSCKASGYTFTGYYIHWVRQAPGQGLEWMGWINPESGGTDYSQRFQGRVTMTRDTSISTAYMELSSLRSDDTAVYYCAREATIFGMVIVPFDYWGQGTLVTVSSASTKGPSVFPLAPSSKSTSGGTAALGCLVKDYFPEPVTVSWNSGALTSGVHTFPAVLQSSGLYSLSSVVTVPSSSLGTQTYICNVNHKPSNTKVDKKVEPKSCDKTHTCPPCPAPELLGGPSVFLFPPKPKDTLMISRTPEVTCVVVDVSHEDPEVKFNWYVDGVEVHNAKTKPCEEQYGSTYRCVSVLTVLHQDWLNGKEYKCKVSNKALPAPIEKTISKAKGQPREPQVYTLPPSREEMTKNQVSLTCLVKGFYPSDIAVEWESNGQPENNYKTTPPVLDSDGSFFLYSKLTVDKSRWQQGNVFSCSVMHEALHNHYTQKSLSLSPGK

SEQ ID NO: 581 - protein, 453 aa, synthetic construct; identical to SEQ ID NO: 577

SEQ ID NO: 582 - protein, 453 aa, synthetic construct
QVPLVQSGAEVKKPGASVKVSCKASGYTFTGYYIHWVRQAPGQGLEWMGWISPNQGETNYAQKFQDRVTMTRDTSISTAYMELSRLRSDDTAVYYCAREATIFGMLIVPFDYWGQGTLVTVSSASTKGPSVFPLAPSSKSTSGGTAALGCLVKDYFPEPVTVSWNSGALTSGVHTFPAVLQSSGLYSLSSVVTVPSSSLGTQTYICNVNHKPSNTKVDKKVEPKSCDKTHTCPPCPAPELLGGPSVFLFPPKPKDTLMISRTPEVTCVVVDVSHEDPEVKFNWYVDGVEVHNAKTKPCEEQYGSTYRCVSVLTVLHQDWLNGKEYKCKVSNKALPAPIEKTISKAKGQPREPQVYTLPPSREEMTKNQVSLTCLVKGFYPSDIAVEWESNGQPENNYKTTPPVLDSDGSFFLYSKLTVDKSRWQQGNVFSCSVMHEALHNHYTQKSLSLSPGK

SEQ ID NO: 583 - protein, 453 aa, synthetic construct
QVPLVQSGAEVKKPGASVKVSCKASGYTFTGYYIHWVRQAPGQGLEWMGWISPNQGDTNYAQKFQDRVTMTRDTSISTAYMELSRLRSDDTAVYYCAREATIFGMLIVPFDYWGQGTLVTVSSASTKGPSVFPLAPSSKSTSGGTAALGCLVKDYFPEPVTVSWNSGALTSGVHTFPAVLQSSGLYSLSSVVTVPSSSLGTQTYICNVNHKPSNTKVDKKVEPKSCDKTHTCPPCPAPELLGGPSVFLFPPKPKDTLMISRTPEVTCVVVDVSHEDPEVKFNWYVDGVEVHNAKTKPCEEQYGSTYRCVSVLTVLHQDWLNGKEYKCKVSNKALPAPIEKTISKAKGQPREPQVYTLPPSREEMTKNQVSLTCLVKGFYPSDIAVEWESNGQPENNYKTTPPVLDSDGSFFLYSKLTVDKSRWQQGNVFSCSVMHEALHNHYTQKSLSLSPGK

SEQ ID NO: 584 - protein, 453 aa, synthetic construct
QVPLVQSGAEVKKPGASVKVSCKASGYTFTGYYIHWVRQAPGQGLEWMGWISPNQGETNYAQKFQDRVTMTRDTSISTAYMELSRLRSDDTAVYYCTREATIFGMLIVPFDYWGQGTLVTVSSASTKGPSVFPLAPSSKSTSGGTAALGCLVKDYFPEPVTVSWNSGALTSGVHTFPAVLQSSGLYSLSSVVTVPSSSLGTQTYICNVNHKPSNTKVDKKVEPKSCDKTHTCPPCPAPELLGGPSVFLFPPKPKDTLMISRTPEVTCVVVDVSHEDPEVKFNWYVDGVEVHNAKTKPCEEQYGSTYRCVSVLTVLHQDWLNGKEYKCKVSNKALPAPIEKTISKAKGQPREPQVYTLPPSREEMTKNQVSLTCLVKGFYPSDIAVEWESNGQPENNYKTTPPVLDSDGSFFLYSKLTVDKSRWQQGNVFSCSVMHEALHNHYTQKSLSLSPGK

SEQ ID NO: 585 - protein, 453 aa, synthetic construct
QVPLVQSGAEVKKPGASVKVSCKASGYTFTGYYIHWVRQAPGQGLEWMGWISPNNGETNYAQKFQDRVTMTRDTSISTAYMELSRLRSDDTAVYYCAREATIFGMLIVPFDYWGQGTLVTVSSASTKGPSVFPLAPSSKSTSGGTAALGCLVKDYFPEPVTVSWNSGALTSGVHTFPAVLQSSGLYSLSSVVTVPSSSLGTQTYICNVNHKPSNTKVDKKVEPKSCDKTHTCPPCPAPELLGGPSVFLFPPKPKDTLMISRTPEVTCVVVDVSHEDPEVKFNWYVDGVEVHNAKTKPCEEQYGSTYRCVSVLTVLHQDWLNGKEYKCKVSNKALPAPIEKTISKAKGQPREPQVYTLPPSREEMTKNQVSLTCLVKGFYPSDIAVEWESNGQPENNYKTTPPVLDSDGSFFLYSKLTVDKSRWQQGNVFSCSVMHEALHNHYTQKSLSLSPGK

SEQ ID NO: 586 - protein, 453 aa, synthetic construct
QVPLVQSGAEVKKPGASVKVSCKASGYTFTGYYIHWVRQAPGQGLEWMGWISPNNGDTNYAQKFQDRVTMTRDTSISTAYMELSRLRSDDTAVYYCAREATIFGMLIVPFDYWGQGTLVTVSSASTKGPSVFPLAPSSKSTSGGTAALGCLVKDYFPEPVTVSWNSGALTSGVHTFPAVLQSSGLYSLSSVVTVPSSSLGTQTYICNVNHKPSNTKVDKKVEPKSCDKTHTCPPCPAPELLGGPSVFLFPPKPKDTLMISRTPEVTCVVVDVSHEDPEVKFNWYVDGVEVHNAKTKPCEEQYGSTYRCVSVLTVLHQDWLNGKEYKCKVSNKALPAPIEKTISKAKGQPREPQVYTLPPSREEMTKNQVSLTCLVKGFYPSDIAVEWESNGQPENNYKTTPPVLDSDGSFFLYSKLTVDKSRWQQGNVFSCSVMHEALHNHYTQKSLSLSPGK

SEQ ID NO: 587 - protein, 453 aa, synthetic construct
QVPLVQSGAEVKKPGASVKVSCKASGYTFTGYYIHWVRQAPGQGLEWMGWISPNQGDTNYAQKFQDRVTMTRDTSISTAYMELSRLRSDDTAVYYCTREATIFGMLIVPFDYWGQGTLVTVSSASTKGPSVFPLAPSSKSTSGGTAALGCLVKDYFPEPVTVSWNSGALTSGVHTFPAVLQSSGLYSLSSVVTVPSSSLGTQTYICNVNHKPSNTKVDKKVEPKSCDKTHTCPPCPAPELLGGPSVFLFPPKPKDTLMISRTPEVTCVVVDVSHEDPEVKFNWYVDGVEVHNAKTKPCEEQYGSTYRCVSVLTVLHQDWLNGKEYKCKVSNKALPAPIEKTISKAKGQPREPQVYTLPPSREEMTKNQVSLTCLVKGFYPSDIAVEWESNGQPENNYKTTPPVLDSDGSFFLYSKLTVDKSRWQQGNVFSCSVMHEALHNHYTQKSLSLSPGK

SEQ ID NO: 588 - protein, 453 aa, synthetic construct
QVPLVQSGAEVKKPGASVKVSCKASGYTFTGYYIHWVRQAPGQGLEWMGWISPNNGETNYAQKFQDRVTMTRDTSISTAYMELSRLRSDDTAVYYCTREATIFGMLIVPFDYWGQGTLVTVSSASTKGPSVFPLAPSSKSTSGGTAALGCLVKDYFPEPVTVSWNSGALTSGVHTFPAVLQSSGLYSLSSVVTVPSSSLGTQTYICNVNHKPSNTKVDKKVEPKSCDKTHTCPPCPAPELLGGPSVFLFPPKPKDTLMISRTPEVTCVVVDVSHEDPEVKFNWYVDGVEVHNAKTKPCEEQYGSTYRCVSVLTVLHQDWLNGKEYKCKVSNKALPAPIEKTISKAKGQPREPQVYTLPPSREEMTKNQVSLTCLVKGFYPSDIAVEWESNGQPENNYKTTPPVLDSDGSFFLYSKLTVDKSRWQQGNVFSCSVMHEALHNHYTQKSLSLSPGK

SEQ ID NO: 589 - protein, 453 aa, synthetic construct; identical to SEQ ID NO: 582

SEQ ID NO: 590 - protein, 453 aa, synthetic construct; identical to SEQ ID NO: 586

SEQ ID NO: 591 - protein, 453 aa, synthetic construct; identical to SEQ ID NO: 583

SEQ ID NO: 592 - protein, 453 aa, synthetic construct; identical to SEQ ID NO: 585

SEQ ID NO: 593 - protein, 453 aa, synthetic construct
QVQLVQSGAEVKKPGASVKVSCKASGYTFTGYYIHWVRQAPGQGLEWMGWISPNQGETNYAQKFQDRVTMTRDTSISTAYMELSSLRSDDTAVYYCAREATIFGMLIVPFDYWGQGTLVTVSSASTKGPSVFPLAPSSKSTSGGTAALGCLVKDYFPEPVTVSWNSGALTSGVHTFPAVLQSSGLYSLSSVVTVPSSSLGTQTYICNVNHKPSNTKVDKKVEPKSCDKTHTCPPCPAPELLGGPSVFLFPPKPKDTLMISRTPEVTCVVVDVSHEDPEVKFNWYVDGVEVHNAKTKPCEEQYGSTYRCVSVLTVLHQDWLNGKEYKCKVSNKALPAPIEKTISKAKGQPREPQVYTLPPSREEMTKNQVSLTCLVKGFYPSDIAVEWESNGQPENNYKTTPPVLDSDGSFFLYSKLTVDKSRWQQGNVFSCSVMHEALHNHYTQKSLSLSPGK

SEQ ID NO: 594 - protein, 453 aa, synthetic construct; identical to SEQ ID NO: 593

SEQ ID NO: 595 - protein, 458 aa, synthetic construct; identical to SEQ ID NO: 472

SEQ ID NO: 596 - protein, 458 aa, synthetic construct; identical to SEQ ID NO: 472

SEQ ID NO: 597 - protein, 458 aa, synthetic construct; identical to SEQ ID NO: 472

SEQ ID NO: 598 - protein, 458 aa, synthetic construct; identical to SEQ ID NO: 472

SEQ ID NO: 599 - protein, 458 aa, synthetic construct; identical to SEQ ID NO: 472

SEQ ID NO: 600 - protein, 458 aa, synthetic construct; identical to SEQ ID NO: 472

SEQ ID NO: 601 - protein, 458 aa, synthetic construct; identical to SEQ ID NO: 472

SEQ ID NO: 602 - protein, 458 aa, synthetic construct; identical to SEQ ID NO: 472

SEQ ID NO: 603 - protein, 458 aa, synthetic construct; identical to SEQ ID NO: 472

SEQ ID NO: 604 - protein, 458 aa, synthetic construct; identical to SEQ ID NO: 472

SEQ ID NO: 605 - protein, 458 aa, synthetic construct; identical to SEQ ID NO: 472

SEQ ID NO: 606 - protein, 458 aa, synthetic construct; identical to SEQ ID NO: 472

SEQ ID NO: 607 - protein, 458 aa, synthetic construct
QMQVVQSGAEVKKPGASVKVSCKASGYTFTGYYMHWVRQAPGQGLEWMGWINPNSGGTNYAQKFQGRVTMTRDTSISTAYMELSSLRSDDTAVYYCARGGDYVFGTYRPHYYYGMDVWGQGTTVTVSSASTKGPSVFPLAPSSKSTSGGTAALGCLVKDYFPEPVTVSWNSGALTSGVHTFPAVLQSSGLYSLSSVVTVPSSSLGTQTYICNVNHKPSNTKVDKKVEPKSCDKTHTCPPCPAPELLGGPSVFLFPPKPKDTLMISRTPEVTCVVVDVSHEDPEVKFNWYVDGVEVHNAKTKPCEEQYGSTYRCVSVLTVLHQDWLNGKEYKCKVSNKALPAPIEKTISKAKGQPREPQVYTLPPSREEMTKNQVSLTCLVKGFYPSDIAVEWESNGQPENNYKTTPPVLDSDGSFFLYSKLTVDKSRWQQGNVFSCSVMHEALHNHYTQKSLSLSPGK

SEQ ID NO: 608 - protein, 458 aa, synthetic construct
QMQVVQSGAEVKKPGASVKVSCKASGYTFTGYYMHWVRQAPGQGLEWMGWINPNSGGTNYAQKFQGRVTMTRDTSISTAYMELSRLRSDDTAVYYCARGGDYVFGTYRPHYYYGMDVWGQGTTVTVSSASTKGPSVFPLAPSSKSTSGGTAALGCLVKDYFPEPVTVSWNSGALTSGVHTFPAVLQSSGLYSLSSVVTVPSSSLGTQTYICNVNHKPSNTKVDKKVEPKSCDKTHTCPPCPAPELLGGPSVFLFPPKPKDTLMISRTPEVTCVVVDVSHEDPEVKFNWYVDGVEVHNAKTKPCEEQYGSTYRCVSVLTVLHQDWLNGKEYKCKVSNKALPAPIEKTISKAKGQPREPQVYTLPPSREEMTKNQVSLTCLVKGFYPSDIAVEWESNGQPENNYKTTPPVLDSDGSFFLYSKLTVDKSRWQQGNVFSCSVMHEALHNHYTQKSLSLSPGK

SEQ ID NO: 609 - protein, 451 aa, synthetic construct; identical to SEQ ID NO: 509

SEQ ID NO: 610 - protein, 451 aa, synthetic construct; identical to SEQ ID NO: 491

SEQ ID NO: 611 - protein, 458 aa, synthetic construct; identical to SEQ ID NO: 472

SEQ ID NO: 612 - protein, 451 aa, synthetic construct
QVQLVESGGGVVQPGRSLRLSCTASGFTFSSYGIHWVRQAPGKGLEWVAVIWYDGSNKFHADSVKGRFTISRDNSKNTLYLQMNSLRAEDSAMYFCARGKVAGMPEAFEIWGQGTKVTVSSASTKGPSVFPLAPSSKSTSGGTAALGCLVKDYFPEPVTVSWNSGALTSGVHTFPAVLQSSGLYSLSSVVTVPSSSLGTQTYICNVNHKPSNTKVDKKVEPKSCDKTHTCPPCPAPELLGGPSVFLFPPKPKDTLMISRTPEVTCVVVDVSHEDPEVKFNWYVDGVEVHNAKTKPCEEQYGSTYRCVSVLTVLHQDWLNGKEYKCKVSNKALPAPIEKTISKAKGQPREPQVYTLPPSREEMTKNQVSLTCLVKGFYPSDIAVEWESNGQPENNYKTTPPVLDSDGSFFLYSKLTVDKSRWQQGNVFSCSVMHEALHNHYTQKSLSLSPGK

SEQ ID NO: 613 - protein, 459 aa, synthetic construct
QMQLVQSGAEVKKPGASVKVSCKASGYTFTSYDINWVRQATGQGLEWMGWMNPNSGNTGYAQKFQGRVTMTRDTSISTAYMELSSLRSQDTAVYYCARGGDYVWGSYRPYYYYYGMDVWGQGTTVTVSSASTKGPSVFPLAPSSKSTSGGTAALGCLVKDYFPEPVTVSWNSGALTSGVHTFPAVLQSSGLYSLSSVVTVPSSSLGTQTYICNVNHKPSNTKVDKKVEPKSCDKTHTCPPCPAPELLGGPSVFLFPPKPKDTLMISRTPEVTCVVVDVSHEDPEVKFNWYVDGVEVHNAKTKPCEEQYGSTYRCVSVLTVLHQDWLNGKEYKCKVSNKALPAPIEKTISKAKGQPREPQVYTLPPSREEMTKNQVSLTCLVKGFYPSDIAVEWESNGQPENNYKTTPPVLDSDGSFFLYSKLTVDKSRWQQGNVFSCSVMHEALHNHYTQKSLSLSPGK

SEQ ID NO: 614 - protein, 451 aa, synthetic construct
QVQLVESGGGVVQPGRSLRLSCAASGFTFSSYGIHWVRQAPGKGLEWVAVIWYDASNKFHADAVKGRFTISRDNSKNTLYLQMNSLRAEDSAMYFCARGKVAGMPEAFEIWGQGTKVTVSSASTKGPSVFPLAPSSKSTSGGTAALGCLVKDYFPEPVTVSWNSGALTSGVHTFPAVLQSSGLYSLSSVVTVPSSSLGTQTYICNVNHKPSNTKVDKKVEPKSCDKTHTCPPCPAPELLGGPSVFLFPPKPKDTLMISRTPEVTCVVVDVSHEDPEVKFNWYVDGVEVHNAKTKPCEEQYGSTYRCVSVLTVLHQDWLNGKEYKCKVSNKALPAPIEKTISKAKGQPREPQVYTLPPSREEMTKNQVSLTCLVKGFYPSDIAVEWESNGQPENNYKTTPPVLDSDGSFFLYSKLTVDKSRWQQGNVFSCSVMHEALHNHYTQKSLSLSPGK

SEQ ID NO: 615 - protein, 451 aa, synthetic construct
QVQLVESGGGVVQPGRSLRLSCTASGFTFSSYGIHWVRQAPGKGLEWVAVIWYDASNKFHADAVKGRFTISRDNSKNTLYLQMNSLRAEDSAMYFCARGKVAGMPEAFEIWGQGTKVTVSSASTKGPSVFPLAPSSKSTSGGTAALGCLVKDYFPEPVTVSWNSGALTSGVHTFPAVLQSSGLYSLSSVVTVPSSSLGTQTYICNVNHKPSNTKVDKKVEPKSCDKTHTCPPCPAPELLGGPSVFLFPPKPKDTLMISRTPEVTCVVVDVSHEDPEVKFNWYVDGVEVHNAKTKPCEEQYGSTYRCVSVLTVLHQDWLNGKEYKCKVSNKALPAPIEKTISKAKGQPREPQVYTLPPSREEMTKNQVSLTCLVKGFYPSDIAVEWESNGQPENNYKTTPPVLDSDGSFFLYSKLTVDKSRWQQGNVFSCSVMHEALHNHYTQKSLSLSPGK

SEQ ID NO: 616 - protein, 451 aa, synthetic construct; identical to SEQ ID NO: 614

SEQ ID NO: 617 - protein, 451 aa, synthetic construct
QVQLVESGGGVVQPGRSLRLSCAASGFTFSSYGIHWVRQAPGKGLEWVAVIWYDASNKFHADAVKGRFTISRDNSKNTLYLQMNSLRAEDSAMYFCARGKVAGMPEAFEIWGQGTLVTVSSASTKGPSVFPLAPSSKSTSGGTAALGCLVKDYFPEPVTVSWNSGALTSGVHTFPAVLQSSGLYSLSSVVTVPSSSLGTQTYICNVNHKPSNTKVDKKVEPKSCDKTHTCPPCPAPELLGGPSVFLFPPKPKDTLMISRTPEVTCVVVDVSHEDPEVKFNWYVDGVEVHNAKTKPCEEQYGSTYRCVSVLTVLHQDWLNGKEYKCKVSNKALPAPIEKTISKAKGQPREPQVYTLPPSREEMTKNQVSLTCLVKGFYPSDIAVEWESNGQPENNYKTTPPVLDSDGSFFLYSKLTVDKSRWQQGNVFSCSVMHEALHNHYTQKSLSLSPGK

SEQ ID NO: 618 - protein, 451 aa, synthetic construct
QVQLVESGGGVVQPGRSLRLSCAASGFTFSSYGIHWVRQAPGKGLEWVAVIWYDASNKFHADSVKGRFTISRDNSKNTLYLQMNSLRAEDSAMYFCARGKVAGMPEAFEIWGQGTKVTVSSASTKGPSVFPLAPSSKSTSGGTAALGCLVKDYFPEPVTVSWNSGALTSGVHTFPAVLQSSGLYSLSSVVTVPSSSLGTQTYICNVNHKPSNTKVDKKVEPKSCDKTHTCPPCPAPELLGGPSVFLFPPKPKDTLMISRTPEVTCVVVDVSHEDPEVKFNWYVDGVEVHNAKTKPCEEQYGSTYRCVSVLTVLHQDWLNGKEYKCKVSNKALPAPIEKTISKAKGQPREPQVYTLPPSREEMTKNQVSLTCLVKGFYPSDIAVEWESNGQPENNYKTTPPVLDSDGSFFLYSKLTVDKSRWQQGNVFSCSVMHEALHNHYTQKSLSLSPGK

SEQ ID NO: 619 - protein, 451 aa, synthetic construct
QVQLVESGGGVVQPGRSLRLSCAASGFTFSSYGIHWVRQAPGKGLEWVAVIWYDGSNKFHADAVKGRFTISRDNSKNTLYLQMNSLRAEDSAMYFCARGKVAGMPEAFEIWGQGTKVTVSSASTKGPSVFPLAPSSKSTSGGTAALGCLVKDYFPEPVTVSWNSGALTSGVHTFPAVLQSSGLYSLSSVVTVPSSSLGTQTYICNVNHKPSNTKVDKKVEPKSCDKTHTCPPCPAPELLGGPSVFLFPPKPKDTLMISRTPEVTCVVVDVSHEDPEVKFNWYVDGVEVHNAKTKPCEEQYGSTYRCVSVLTVLHQDWLNGKEYKCKVSNKALPAPIEKTISKAKGQPREPQVYTLPPSREEMTKNQVSLTCLVKGFYPSDIAVEWESNGQPENNYKTTPPVLDSDGSFFLYSKLTVDKSRWQQGNVFSCSVMHEALHNHYTQKSLSLSPGK

SEQ ID NO: 620 - protein, 459 aa, synthetic construct
QMQLVQSGAEVKKPGASVKVSCKASGYTFTSYDINWVRQATGQGLEWMGWMNPNSGGTGYAQKFQGRVTMTRDTSISTAYMELSSLRSQDTAVYYCARGGDYVWGSYRPYYYYYGMDVWGQGTTVTVSSASTKGPSVFPLAPSSKSTSGGTAALGCLVKDYFPEPVTVSWNSGALTSGVHTFPAVLQSSGLYSLSSVVTVPSSSLGTQTYICNVNHKPSNTKVDKKVEPKSCDKTHTCPPCPAPELLGGPSVFLFPPKPKDTLMISRTPEVTCVVVDVSHEDPEVKFNWYVDGVEVHNAKTKPCEEQYGSTYRCVSVLTVLHQDWLNGKEYKCKVSNKALPAPIEKTISKAKGQPREPQVYTLPPSREEMTKNQVSLTCLVKGFYPSDIAVEWESNGQPENNYKTTPPVLDSDGSFFLYSKLTVDKSRWQQGNVFSCSVMHEALHNHYTQKSLSLSPGK

SEQ ID NO: 621 - protein, 459 aa, synthetic construct; identical to SEQ ID NO: 613

SEQ ID NO: 622 - protein, 459 aa, synthetic construct; identical to SEQ ID NO: 620

SEQ ID NO: 623 - protein, 459 aa, synthetic construct
QMQLVQSGAEVKKPGASVKVSCKASGYTFTSYDINWVRQAPGQGLEWMGWMNPNSGGTGYAQKFQGRVTMTRDTSISTAYMELSSLRSDDTAVYYCARGGDYVWGSYRPYYYYYGMDVWGQGTTVTVSSASTKGPSVFPLAPSSKSTSGGTAALGCLVKDYFPEPVTVSWNSGALTSGVHTFPAVLQSSGLYSLSSVVTVPSSSLGTQTYICNVNHKPSNTKVDKKVEPKSCDKTHTCPPCPAPELLGGPSVFLFPPKPKDTLMISRTPEVTCVVVDVSHEDPEVKFNWYVDGVEVHNAKTKPCEEQYGSTYRCVSVLTVLHQDWLNGKEYKCKVSNKALPAPIEKTISKAKGQPREPQVYTLPPSREEMTKNQVSLTCLVKGFYPSDIAVEWESNGQPENNYKTTPPVLDSDGSFFLYSKLTVDKSRWQQGNVFSCSVMHEALHNHYTQKSLSLSPGK

SEQ ID NO: 624 - protein, 459 aa, synthetic construct; identical to SEQ ID NO: 620

SEQ ID NO: 625 - protein, 459 aa, synthetic construct
QMQLVQSGAEVKKPGASVKVSCKASGYTFTSYDINWVRQAPGQGLEWMGWMNPNSGNTGYAQKFQGRVTMTRDTSISTAYMELSSLRSDDTAVYYCARGGDYVWGSYRPYYYYYGMDVWGQGTTVTVSSASTKGPSVFPLAPSSKSTSGGTAALGCLVKDYFPEPVTVSWNSGALTSGVHTFPAVLQSSGLYSLSSVVTVPSSSLGTQTYICNVNHKPSNTKVDKKVEPKSCDKTHTCPPCPAPELLGGPSVFLFPPKPKDTLMISRTPEVTCVVVDVSHEDPEVKFNWYVDGVEVHNAKTKPCEEQYGSTYRCVSVLTVLHQDWLNGKEYKCKVSNKALPAPIEKTISKAKGQPREPQVYTLPPSREEMTKNQVSLTCLVKGFYPSDIAVEWESNGQPENNYKTTPPVLDSDGSFFLYSKLTVDKSRWQQGNVFSCSVMHEALHNHYTQKSLSLSPGK

SEQ ID NO: 626 - protein, 459 aa, synthetic construct
QMQLVQSGAEVKKPGASVKVSCKASGYTFTSYDINWVRQATGQGLEWMGWMNPNSGGTGYAQKFQGRVTMTRDTSISTAYMELSSLRSQDTAVYYCARGGDYVFGSYRPYYYYYGMDVWGQGTTVTVSSASTKGPSVFPLAPSSKSTSGGTAALGCLVKDYFPEPVTVSWNSGALTSGVHTFPAVLQSSGLYSLSSVVTVPSSSLGTQTYICNVNHKPSNTKVDKKVEPKSCDKTHTCPPCPAPELLGGPSVFLFPPKPKDTLMISRTPEVTCVVVDVSHEDPEVKFNWYVDGVEVHNAKTKPCEEQYGSTYRCVSVLTVLHQDWLNGKEYKCKVSNKALPAPIEKTISKAKGQPREPQVYTLPPSREEMTKNQVSLTCLVKGFYPSDIAVEWESNGQPENNYKTTPPVLDSDGSFFLYSKLTVDKSRWQQGNVFSCSVMHEALHNHYTQKSLSLSPGK

SEQ ID NO: 627 - protein, 459 aa, synthetic construct
QMQLVQSGAEVKKPGASVKVSCKASGYTFTSYDINWVRQAPGQGLEWMGWMNPNSGGTGYAQKFQGRVTMTRDTSISTAYMELSSLRSDDTAVYYCARGGDYVFGSYRPYYYYYGMDVWGQGTTVTVSSASTKGPSVFPLAPSSKSTSGGTAALGCLVKDYFPEPVTVSWNSGALTSGVHTFPAVLQSSGLYSLSSVVTVPSSSLGTQTYICNVNHKPSNTKVDKKVEPKSCDKTHTCPPCPAPELLGGPSVFLFPPKPKDTLMISRTPEVTCVVVDVSHEDPEVKFNWYVDGVEVHNAKTKPCEEQYGSTYRCVSVLTVLHQDWLNGKEYKCKVSNKALPAPIEKTISKAKGQPREPQVYTLPPSREEMTKNQVSLTCLVKGFYPSDIAVEWESNGQPENNYKTTPPVLDSDGSFFLYSKLTVDKSRWQQGNVFSCSVMHEALHNHYTQKSLSLSPGK

SEQ ID NO: 628 - protein, 451 aa, synthetic construct; identical to SEQ ID NO: 617

SEQ ID NO: 629 - protein, 13 aa, synthetic construct
SGSSSNIGSNTVN

SEQ ID NO: 630 - protein, 11 aa, synthetic construct
RASQDIRDYLG

SEQ ID NO: 631 - protein, 11 aa, synthetic construct
RASQDIRDYLG

SEQ ID NO: 632 - protein, 11 aa, synthetic construct
QASQDISNYLN

SEQ ID NO: 633 - protein, 17 aa, synthetic construct
KSSQSVLSSSNNKNYIA

SEQ ID NO: 634 - protein, 17 aa, synthetic construct
KSSQSVLSSSNNKNYIA

SEQ ID NO: 635 - protein, 17 aa, synthetic construct
KSSQSVLSSSNNKNYLA

SEQ ID NO: 636 - protein, 17 aa, synthetic construct
KSSQSVLSSSNNKNYLA

SEQ ID NO: 637 - protein, 12 aa, synthetic construct
RASQSISYSYLA

SEQ ID NO: 638 - protein, 11 aa, synthetic construct
RASQSVSSNLA

SEQ ID NO: 639 - protein, 11 aa, synthetic construct
RASQGIRNELG

SEQ ID NO: 640 - protein, 11 aa, synthetic construct
QASQDITNYLN

SEQ ID NO: 641 - protein, 11 aa, synthetic construct
RASQGLIIWLA

SEQ ID NO: 642 - protein, 11 aa, synthetic construct
RASQGLIIWLA

SEQ ID NO: 643 - protein, 11 aa, synthetic construct
RASQGIRNELG

SEQ ID NO: 644 - protein, 11 aa, synthetic construct
RASQGIRNELG

SEQ ID NO: 645 - protein, 11 aa, synthetic construct
RASQGIRNELG

SEQ ID NO: 646 - protein, 11 aa, synthetic construct
RASQGIRNELG

SEQ ID NO: 647 - protein, 11 aa, synthetic construct
RASQGIRNELG

SEQ ID NO: 648 - protein, 11 aa, synthetic construct
RASQGIRNELG

SEQ ID NO: 649 - protein, 11 aa, synthetic construct
RASQDIRDYLG

SEQ ID NO: 650 - protein, 11 aa, synthetic construct
RASQDIRDYLG

SEQ ID NO: 651 - protein, 11 aa, synthetic construct
RASQDIRDYLG

SEQ ID NO: 652 - protein, 11 aa, synthetic construct
RASQDIRDYLG

SEQ ID NO: 653 - protein, 11 aa, synthetic construct
RASQDIRDYLG

SEQ ID NO: 654 - protein, 11 aa, synthetic construct
RASQDIRDYLG

SEQ ID NO: 655 - protein, 11 aa, synthetic construct
RASQDIRDYLG

SEQ ID NO: 656 - protein, 11 aa, synthetic construct
RASQDLRNYLG

SEQ ID NO: 657 - protein, 11 aa, synthetic construct
RASQDLRNYLG

SEQ ID NO: 658 - protein, 11 aa, synthetic construct
RASQDLRNYLG

SEQ ID NO: 659 - protein, 11 aa, synthetic construct
RASQDLRNYLG

SEQ ID NO: 660 - protein, 11 aa, synthetic construct
RASQDLRNYLG

SEQ ID NO: 661 - protein, 11 aa, synthetic construct
RASQDLRNYLG

SEQ ID NO: 662 - protein, 11 aa, synthetic construct
RASQDLRNYLG

SEQ ID NO: 663 - protein, 11 aa, synthetic construct
RASQDLRNYLG

SEQ ID NO: 664 - protein, 11 aa, synthetic construct
RASQDLRNYLG

SEQ ID NO: 665 - protein, 11 aa, synthetic construct
RASQDLRNYLG

SEQ ID NO: 666 - protein, 11 aa, synthetic construct
RASQDLRNYLG

SEQ ID NO: 667 - protein, 11 aa, synthetic construct
RASQDLRNYLG

SEQ ID NO: 668 - protein, 11 aa, synthetic construct
QASQDISNYLN

SEQ ID NO: 669 - protein, 11 aa, synthetic construct
QASQDISNYLN

SEQ ID NO: 670 - protein, 11 aa, synthetic construct
QASQDISNYLN

SEQ ID NO: 671 - protein, 11 aa, synthetic construct
QASQDISNYLN

SEQ ID NO: 672 - protein, 11 aa, synthetic construct
QASQDISNYLN

SEQ ID NO: 673 - protein, 11 aa, synthetic construct
QASQDISNYLN

SEQ ID NO: 674 - protein, 11 aa, synthetic construct
QASQDISNYLN

SEQ ID NO: 675 - protein, 11 aa, synthetic construct
QASQDISNYLN

SEQ ID NO: 676 - protein, 11 aa, synthetic construct
QASQDISNYLN

SEQ ID NO: 677 - protein, 11 aa, synthetic construct
RASQDIRDYLG

SEQ ID NO: 678 - protein, 11 aa, synthetic construct
RASQDIRDYLG

SEQ ID NO: 679 - protein, 11 aa, synthetic construct
RASQDIRDYLG

SEQ ID NO: 680 - protein, 11 aa, synthetic construct
RASQDIRDYLG

SEQ ID NO: 681 - protein, 11 aa, synthetic construct
RASQDIRDYLG

SEQ ID NO: 682 - protein, 11 aa, synthetic construct
RASQDIRDYLG

SEQ ID NO: 683 - protein, 11 aa, synthetic construct
RASQDIRDYLG

SEQ ID NO: 684 - protein, 11 aa, synthetic construct
QASQDITNYLN

SEQ ID NO: 685 - protein, 11 aa, synthetic construct
QASQDITNYLN

SEQ ID NO: 686 - protein, 11 aa, synthetic construct
QASQDITNYLN

SEQ ID NO: 687 - protein, 11 aa, synthetic construct
QASQDITNYLN

SEQ ID NO: 688 - protein, 11 aa, synthetic construct
QASQDITNYLN

SEQ ID NO: 689 - protein, 11 aa, synthetic construct
QASQDITNYLN

SEQ ID NO: 690 - protein, 11 aa, synthetic construct
QASQDITNYLN

SEQ ID NO: 691 - protein, 11 aa, synthetic construct
QASQDITNYLN

SEQ ID NO: 692 - protein, 11 aa, synthetic construct
QASQDITNYLN

SEQ ID NO: 693 - protein, 11 aa, synthetic construct
QASQDITNYLN

SEQ ID NO: 694 - protein, 11 aa, synthetic construct
QASQDITNYLN

SEQ ID NO: 695 - protein, 12 aa, synthetic construct
RASQIFTSTYLA

SEQ ID NO: 696 - protein, 12 aa, synthetic construct
RASQIFTSTYLA

SEQ ID NO: 697 - protein, 12 aa, synthetic construct
RASQIFTSTYLA

SEQ ID NO: 698 - protein, 12 aa, synthetic construct
RASQIFTSTYLA

SEQ ID NO: 699 - protein, 11 aa, synthetic construct
RASQSVSSNLA

SEQ ID NO: 700 - protein, 11 aa, synthetic construct
RASQSVSSNLA

SEQ ID NO: 701 - protein, 11 aa, synthetic construct
RASQSVSSNLA

SEQ ID NO: 702 - protein, 11 aa, synthetic construct
RASQSVSSNLA

SEQ ID NO: 703 - protein, 11 aa, synthetic construct
RASQSVSSNLA

SEQ ID NO: 704 - protein, 11 aa, synthetic construct
RASQSVSSNLA

SEQ ID NO: 705 - protein, 11 aa, synthetic construct
RASQSVSSNLA

SEQ ID NO: 706 - protein, 11 aa, synthetic construct
RASQSVSSNLA

SEQ ID NO: 707 - protein, 12 aa, synthetic construct
RASQSISYSYLA

SEQ ID NO: 708 - protein, 12 aa, synthetic construct
RASQSISYSYLA

SEQ ID NO: 709 - protein, 12 aa, synthetic construct
RASQSISYSYLA

SEQ ID NO: 710 - protein, 12 aa, synthetic construct
RASQSISYSYLA

SEQ ID NO: 711 - protein, 12 aa, synthetic construct
RASQSISYSYLA

SEQ ID NO: 712 - protein, 12 aa, synthetic construct
RASQSISYSYLA

SEQ ID NO: 713 - protein, 12 aa, synthetic construct
RASQSISYSYLA

SEQ ID NO: 714 - protein, 17 aa, synthetic construct
KSSQSVLSSSNNKNYIA

SEQ ID NO: 715 - protein, 17 aa, synthetic construct
KSSQSVLSSSNNKNYIA

SEQ ID NO: 716 - protein, 17 aa, synthetic construct
KSSQSVLSSSNNKNYIA

SEQ ID NO: 717 - protein, 17 aa, synthetic construct
KSSQSVLSSSNNKNYIA

SEQ ID NO: 718 - protein, 17 aa, synthetic construct
KSSQSVLSSSNNKNYIA

SEQ ID NO: 719 - protein, 17 aa, synthetic construct
KSSQSVLSSSNNKNYIA

SEQ ID NO: 720 - protein, 17 aa, synthetic construct
KSSQSVLSSSNNKNYIA

SEQ ID NO: 721 - protein, 17 aa, synthetic construct
KSSQSVLSSSNNKNYIA

SEQ ID NO: 722 - protein, 17 aa, synthetic construct
KSSQSVLSSSNNKNYIA

SEQ ID NO: 723 - protein, 17 aa, synthetic construct
KSSQSVLSSSNNKNYIA

SEQ ID NO: 724 - protein, 17 aa, synthetic construct
KSSQSVLSSSNNKNYIA

SEQ ID NO: 725 - protein, 17 aa, synthetic construct
KSSQSVLSSSNNKNYLA

SEQ ID NO: 726 - protein, 17 aa, synthetic construct
KSSQSVLSSSNNKNYLA

SEQ ID NO: 727 - protein, 17 aa, synthetic construct
KSSQSVLSSSNNKNYLA

SEQ ID NO: 728 - protein, 17 aa, synthetic construct
KSSQSVLSSSNNKNYLA

SEQ ID NO: 729 - protein, 17 aa, synthetic construct
KSSQSVLSSSNNKNYLA

SEQ ID NO: 730 - protein, 17 aa, synthetic construct
KSSQSVLSSSNNKNYLA

SEQ ID NO: 731 - protein, 17 aa, synthetic construct
KSSQSVLSSSNNKNYLA

SEQ ID NO: 732 - protein, 17 aa, synthetic construct
KSSQSVLSSSNNKNYLA

SEQ ID NO: 733 - protein, 17 aa, synthetic construct
KSSQSVLSSSNNKNYLA

SEQ ID NO: 734 - protein, 17 aa, synthetic construct
KSSQSVLSSSNNKNYIA

SEQ ID NO: 735 - protein, 17 aa, synthetic construct
KSSQSVLSSSNNKNYIA

SEQ ID NO: 736 - protein, 17 aa, synthetic construct
KSSQSVLSSSNNKNYIA

SEQ ID NO: 737 - protein, 17 aa, synthetic construct
KSSQSVLSSSNNKNYIA

SEQ ID NO: 738 - protein, 17 aa, synthetic construct
KSSQSVLSSSNNKNYIA

SEQ ID NO: 739 - protein, 17 aa, synthetic construct
KSSQSVLSSSNNKNYLA

SEQ ID NO: 740 - protein, 17 aa, synthetic construct
KSSQSVLSSSNNKNYLA

SEQ ID NO: 741 - protein, 17 aa, synthetic construct
KSSQSVLSSSNNKNYLA

SEQ ID NO: 742 - protein, 17 aa, synthetic construct
KSSQSVLSSSNNKNYLA

SEQ ID NO: 743 - protein, 17 aa, synthetic construct
KSSQSVLSSSNNKNYLA

SEQ ID NO: 744 - protein, 17 aa, synthetic construct
KSSQSVLSSSNNKNYLA

SEQ ID NO: 745 - protein, 17 aa, synthetic construct
KSSQSVLSSSNNKNYLA

SEQ ID NO: 746 - protein, 17 aa, synthetic construct
KSSQSVLSSSNNKNYLA

SEQ ID NO: 747 - protein, 17 aa, synthetic construct
KSSQSVLSSSNNKNYLA

SEQ ID NO: 748 - protein, 17 aa, synthetic construct
KSSQSVLSSSNNKNYLA

SEQ ID NO: 749 - protein, 17 aa, synthetic construct
KSSQSVLSSSNNKNYLA

SEQ ID NO: 750 - protein, 17 aa, synthetic construct
KSSQSVLSSSNNKNYLA

SEQ ID NO: 751 - protein, 17 aa, synthetic construct
KSSQSVLSSSNNKNYLA

SEQ ID NO: 752 - protein, 13 aa, synthetic construct
SGSSSNIGSQTVN

SEQ ID NO: 753 - protein, 13 aa, synthetic construct
SGSSSNIGSQTVN

SEQ ID NO: 754 - protein, 13 aa, synthetic construct
SGSSSNIGSNYVN

SEQ ID NO: 755 - protein, 13 aa, synthetic construct
SGSSSNIGSNYVN

SEQ ID NO: 756 - protein, 13 aa, synthetic construct
SGSSSNIGSQTVN

SEQ ID NO: 757 - protein, 13 aa, synthetic construct
SGSSSNIGSNYVN

SEQ ID NO: 758 - protein, 13 aa, synthetic construct
SGSSSNIGSNTVN

SEQ ID NO: 759 - protein, 13 aa, synthetic construct
SGSSSNIGSNTVN

SEQ ID NO: 760 - protein, 13 aa, synthetic construct
SGSSSNIGSNTVN

SEQ ID NO: 761 - protein, 13 aa, synthetic construct
SGSSSNIGSNTVN

SEQ ID NO: 762 - protein, 13 aa, synthetic construct
SGSSSNIGSNTVN

SEQ ID NO: 763 - protein, 13 aa, synthetic construct
SGSSSNIGSNYVN

SEQ ID NO: 764 - protein, 13 aa, synthetic construct
SGSSSNIGSNYVN

SEQ ID NO: 765 - protein, 13 aa, synthetic construct
SGSSSNIGSQTVN

SEQ ID NO: 766 - protein, 11 aa, synthetic construct
RASQDLRNYLG

SEQ ID NO: 767 - protein, 11 aa, synthetic construct
RASQDIRDYLG

SEQ ID NO: 768 - protein, 13 aa, synthetic construct
SGSSSNIGSNTVN

SEQ ID NO: 769 - protein, 11 aa, synthetic construct
RASQTISRFLN

SEQ ID NO: 770 - protein, 13 aa, synthetic construct
SGSSSNIGNNYVS

SEQ ID NO: 771 - protein, 11 aa, synthetic construct
RASQTISRFLN

SEQ ID NO: 772 - protein, 11 aa, synthetic construct
RASQTISRFLN

SEQ ID NO: 773 - protein, 11 aa, synthetic construct
RASQTISRFLN

SEQ ID NO: 774 - protein, 11 aa, synthetic construct
RASQTISRFLN

SEQ ID NO: 775 - protein, 11 aa, synthetic construct
RASQTISRFLN

SEQ ID NO: 776 - protein, 11 aa, synthetic construct
RASQTISRFLN

SEQ ID NO: 777 - protein, 13 aa, synthetic construct
SGSSSNIGNNYVS

SEQ ID NO: 778 - protein, 13 aa, synthetic construct
SGSSSNIGNNYVS

SEQ ID NO: 779 - protein, 13 aa, synthetic construct
SGSSSNIGNNYVS

SEQ ID NO: 780 - protein, 13 aa, synthetic construct
SGSSSNIGNNYVS

SEQ ID NO: 781 - protein, 13 aa, synthetic construct
SGSSSNIGNNYVS

SEQ ID NO: 782 - protein, 13 aa, synthetic construct
SGSSSNIGNNYVS

SEQ ID NO: 783 - protein, 13 aa, synthetic construct
SGSSSNIGNNYVS

SEQ ID NO: 784 - protein, 13 aa, synthetic construct
SGSSSNIGNNYVS

SEQ ID NO: 785 - protein, 11 aa, synthetic construct
RASQTISRFLN

SEQ ID NO: 786 - protein, 7 aa, synthetic construct
TNNQRPS

SEQ ID NO: 787 - protein, 7 aa, synthetic construct
GASSLQS

SEQ ID NO: 788 - protein, 7 aa, synthetic construct
GASSLQS

SEQ ID NO: 789 - protein, 7 aa, synthetic construct
DASNLET

SEQ ID NO: 790 - protein, 7 aa, synthetic construct
WASTRES

SEQ ID NO: 791 - protein, 7 aa, synthetic construct
WASTRES

SEQ ID NO: 792 - protein, 7 aa, synthetic construct
WTSTRDS

SEQ ID NO: 793 - protein, 7 aa, synthetic construct
WTSTRDS

SEQ ID NO: 794 - protein, 7 aa, synthetic construct
GASSRAT

SEQ ID NO: 795 - protein, 7 aa, synthetic construct
GAATRAT

SEQ ID NO: 796 - protein, 7 aa, synthetic construct
GASSLQS

SEQ ID NO: 797 - protein, 7 aa, synthetic construct
DASNLEP

SEQ ID NO: 798 - protein, 7 aa, synthetic construct
AASSLQS

SEQ ID NO: 799 - protein, 7 aa, synthetic construct
AASSLQS

SEQ ID NO: 800 - protein, 7 aa, synthetic construct
GASSLQS

SEQ ID NO: 801 - protein, 7 aa, synthetic construct
GASSLQS

SEQ ID NO: 802 - protein, 7 aa, synthetic construct
GASSLQS

SEQ ID NO: 803 - protein, 7 aa, synthetic construct
GASSLQS

SEQ ID NO: 804 - protein, 7 aa, synthetic construct
GASSLQS

SEQ ID NO: 805 - protein, 7 aa, synthetic construct
GASSLQS

SEQ ID NO: 806 - protein, 7 aa, synthetic construct
GASSLQS

SEQ ID NO: 807 - protein, 7 aa, synthetic construct
GASSLQS

SEQ ID NO: 808 - protein, 7 aa, synthetic construct
GASSLQS

SEQ ID NO: 809 - protein, 7 aa, synthetic construct
GASSLQS

SEQ ID NO: 810 - protein, 7 aa, synthetic construct
GASSLQS

SEQ ID NO: 811 - protein, 7 aa, synthetic construct
GASSLQS

SEQ ID NO: 812 - protein, 7 aa, synthetic construct
GASSLQS

SEQ ID NO: 813 - protein, 7 aa, synthetic construct
GASSLQS

SEQ ID NO: 814 - protein, 7 aa, synthetic construct
GASSLQS

SEQ ID NO: 815 - protein, 7 aa, synthetic construct
GASSLQS

SEQ ID NO: 816 - protein, 7 aa, synthetic construct
GASSLQS

SEQ ID NO: 817 - protein, 7 aa, synthetic construct
GASSLQS

SEQ ID NO: 818 - protein, 7 aa, synthetic construct
GASSLQS

SEQ ID NO: 819 - protein, 7 aa, synthetic construct
GASSLQS

SEQ ID NO: 820 - protein, 7 aa, synthetic construct
GASSLQS

SEQ ID NO: 821 - protein, 7 aa, synthetic construct
GASSLQS

SEQ ID NO: 822 - protein, 7 aa, synthetic construct
GASSLQS

SEQ ID NO: 823 - protein, 7 aa, synthetic construct
GASSLQS

SEQ ID NO: 824 - protein, 7 aa, synthetic construct
GASSLQS

SEQ ID NO: 825 - protein, 7 aa, synthetic construct
DASNLET

SEQ ID NO: 826 - protein, 7 aa, synthetic construct
DASNLET

SEQ ID NO: 827 - protein, 7 aa, synthetic construct
DASNLET

SEQ ID NO: 828 - protein, 7 aa, synthetic construct
DASNLET

SEQ ID NO: 829 - protein, 7 aa, synthetic construct
DASNLET

SEQ ID NO: 830 - protein, 7 aa, synthetic construct
DASNLET

SEQ ID NO: 831 - protein, 7 aa, synthetic construct
DASNLET

SEQ ID NO: 832 - protein, 7 aa, synthetic construct
DASNLET

SEQ ID NO: 833 - protein, 7 aa, synthetic construct
DASNLET

SEQ ID NO: 834 - protein, 7 aa, synthetic construct
GASSLQS

SEQ ID NO: 835 - protein, 7 aa, synthetic construct
GASSLQS

SEQ ID NO: 836 - protein, 7 aa, synthetic construct
GASSLQS

SEQ ID NO: 837 - protein, 7 aa, synthetic construct
GASSLQS

SEQ ID NO: 838 - protein, 7 aa, synthetic construct
GASSLQS

SEQ ID NO: 839 - protein, 7 aa, synthetic construct
GASSLQS

SEQ ID NO: 840 - protein, 7 aa, synthetic construct
GASSLQS

SEQ ID NO: 841 - protein, 7 aa, synthetic construct
DASNLEP

SEQ ID NO: 842 - protein, 7 aa, synthetic construct
DASNLEP

SEQ ID NO: 843 - protein, 7 aa, synthetic construct
DASNLEP

SEQ ID NO: 844 - protein, 7 aa, synthetic construct
DASNLEP

SEQ ID NO: 845 - protein, 7 aa, synthetic construct
DASNLEP

SEQ ID NO: 846 - protein, 7 aa, synthetic construct
DASNLEP

SEQ ID NO: 847 - protein, 7 aa, synthetic construct
DASNLEP

SEQ ID NO: 848 - protein, 7 aa, synthetic construct
DASNLEP

SEQ ID NO: 849 - protein, 7 aa, synthetic construct
DASNLEP

SEQ ID NO: 850 - protein, 7 aa, synthetic construct
DASNLEP

SEQ ID NO: 851 - protein, 7 aa, synthetic construct
DASNLEP

SEQ ID NO: 852 - protein, 7 aa, synthetic construct
GASSRAT

SEQ ID NO: 853 - protein, 7 aa, synthetic construct
GASSRAT

SEQ ID NO: 854 - protein, 7 aa, synthetic construct
GASSRAT

SEQ ID NO: 855 - protein, 7 aa, synthetic construct
GASSRAT

SEQ ID NO: 856 - protein, 7 aa, synthetic construct
GAATRAT

SEQ ID NO: 857 - protein, 7 aa, synthetic construct
GAATRAT

SEQ ID NO: 858 - protein, 7 aa, synthetic construct
GAATRAT

SEQ ID NO: 859 - protein, 7 aa, synthetic construct
GAATRAT

SEQ ID NO: 860 - protein, 7 aa, synthetic construct
GAATRAT

SEQ ID NO: 861 - protein, 7 aa, synthetic construct
GAATRAT

SEQ ID NO: 862 - protein, 7 aa, synthetic construct
GAATRAT

SEQ ID NO: 863 - protein, 7 aa, synthetic construct
GAATRAT

SEQ ID NO: 864 - protein, 7 aa, synthetic construct
GASSRAT

SEQ ID NO: 865 - protein, 7 aa, synthetic construct
GASSRAT

SEQ ID NO: 866 - protein, 7 aa, synthetic construct
GASSRAT

SEQ ID NO: 867 - protein, 7 aa, synthetic construct
GASSRAT

SEQ ID NO: 868 - protein, 7 aa, synthetic construct
GASSRAT

SEQ ID NO: 869 - protein, 7 aa, synthetic construct
GASSRAT

SEQ ID NO: 870 - protein, 7 aa, synthetic construct
GASSRAT

SEQ ID NO: 871 - protein, 7 aa, synthetic construct
WASTRES

SEQ ID NO: 872 - protein, 7 aa, synthetic construct
WASTRES

SEQ ID NO: 873 - protein, 7 aa, synthetic construct
WASTRES

SEQ ID NO: 874 - protein, 7 aa, synthetic construct
WASTRES

SEQ ID NO: 875 - protein, 7 aa, synthetic construct
WASTRES

SEQ ID NO: 876 - protein, 7 aa, synthetic construct
WASTRES

SEQ ID NO: 877 - protein, 7 aa, synthetic construct
WASTRES

SEQ ID NO: 878 - protein, 7 aa, synthetic construct
WASTRES

SEQ ID NO: 879 - protein, 7 aa, synthetic construct
WASTRES

SEQ ID NO: 880 - protein, 7 aa, synthetic construct
WASTRES

SEQ ID NO: 881 - protein, 7 aa, synthetic construct
WASTRES

SEQ ID NO: 882 - protein, 7 aa, synthetic construct
WTSTRES

SEQ ID NO: 883 - protein, 7 aa, synthetic construct
WTSTRES

SEQ ID NO: 884 - protein, 7 aa, synthetic construct
WTSTRDS

SEQ ID NO: 885 - protein, 7 aa, synthetic construct
WTSTRES

SEQ ID NO: 886 - protein, 7 aa, synthetic construct
WTSTRES

SEQ ID NO: 887 - protein, 7 aa, synthetic construct
WTSTRDS

SEQ ID NO: 888 - protein, 7 aa, synthetic construct
WTSTRDS

SEQ ID NO: 889 - protein, 7 aa, synthetic construct
WTSTRES

SEQ ID NO: 890 - protein, 7 aa, synthetic construct
WTSTRES

SEQ ID NO: 891 - protein, 7 aa, synthetic construct
WASTRES

SEQ ID NO: 892 - protein, 7 aa, synthetic construct
WASTRES

SEQ ID NO: 893 - protein, 7 aa, synthetic construct
WASTRES

SEQ ID NO: 894 - protein, 7 aa, synthetic construct
WASTRES

SEQ ID NO: 895 - protein, 7 aa, synthetic construct
WASTRES

SEQ ID NO: 896 - protein, 7 aa, synthetic construct
WTSTRDS

SEQ ID NO: 897 - protein, 7 aa, synthetic construct
WTSTRDS

SEQ ID NO: 898 - protein, 7 aa, synthetic construct
WTSTRDS

SEQ ID NO: 899 - protein, 7 aa, synthetic construct
WTSTRDS

SEQ ID NO: 900 - protein, 7 aa, synthetic construct
WTSTRDS

SEQ ID NO: 901 - protein, 7 aa, synthetic construct
WTSTRDS

SEQ ID NO: 902 - protein, 7 aa, synthetic construct
WTSTRDS

SEQ ID NO: 903 - protein, 7 aa, synthetic construct
WTSTRES

SEQ ID NO: 904 - protein, 7 aa, synthetic construct
WTSTRES

SEQ ID NO: 905 - protein, 7 aa, synthetic construct
WTSTRES

SEQ ID NO: 906 - protein, 7 aa, synthetic construct
WTSTRES

SEQ ID NO: 907 - protein, 7 aa, synthetic construct
WTSTRDS

SEQ ID NO: 908 - protein, 7 aa, synthetic construct
WTSTRES

SEQ ID NO: 909 - protein, 7 aa, synthetic construct
TNNQRPS

SEQ ID NO: 910 - protein, 7 aa, synthetic construct
TNNQRPS

SEQ ID NO: 911 - protein, 7 aa, synthetic construct
TNNQRPS

SEQ ID NO: 912 - protein, 7 aa, synthetic construct
TNNQRPS

SEQ ID NO: 913 - protein, 7 aa, synthetic construct
TNNQRPS

SEQ ID NO: 914 - protein, 7 aa, synthetic construct
TNNQRPS

SEQ ID NO: 915 - protein, 7 aa, synthetic construct
TNNQRPS

SEQ ID NO: 916 - protein, 7 aa, synthetic construct
TNNQRPS

SEQ ID NO: 917 - protein, 7 aa, synthetic construct
TNNQRPS

SEQ ID NO: 918 - protein, 7 aa, synthetic construct
TNNQRPS

SEQ ID NO: 919 - protein, 7 aa, synthetic construct
TNNQRPS

SEQ ID NO: 920 - protein, 7 aa, synthetic construct
TNNQRPS

SEQ ID NO: 921 - protein, 7 aa, synthetic construct
TNNQRPS

SEQ ID NO: 922 - protein, 7 aa, synthetic construct
TNNQRPS

SEQ ID NO: 923 - protein, 7 aa, synthetic construct
GASSLQS

SEQ ID NO: 924 - protein, 7 aa, synthetic construct
GASSLQS

SEQ ID NO: 925 - protein, 7 aa, synthetic construct
TNNQRPS

SEQ ID NO: 926 - protein, 7 aa, synthetic construct
VASSLQS

SEQ ID NO: 927 - protein, 7 aa, synthetic construct
DNNKRPS

SEQ ID NO: 928 - protein, 7 aa, synthetic construct
VASSLQS

SEQ ID NO: 929 - protein, 7 aa, synthetic construct
VASSLQS

SEQ ID NO: 930 - protein, 7 aa, synthetic construct
VASSLQS

SEQ ID NO: 931 - protein, 7 aa, synthetic construct
VASSLQS

SEQ ID NO: 932 - protein, 7 aa, synthetic construct
VASSLQS

SEQ ID NO: 933 - protein, 7 aa, synthetic construct
VASSLQS

SEQ ID NO: 934 - protein, 7 aa, synthetic construct
DNNKRPS

SEQ ID NO: 935 - protein, 7 aa, synthetic construct
DNNKRPS

SEQ ID NO: 936 - protein, 7 aa, synthetic construct
DNNKRPS

SEQ ID NO: 937 - protein, 7 aa, synthetic construct
DNNKRPS

SEQ ID NO: 938 - protein, 7 aa, synthetic construct
DNNKRPS

SEQ ID NO: 939 - protein, 7 aa, synthetic construct
DNNKRPS

SEQ ID NO: 940 - protein, 7 aa, synthetic construct
DNNKRPS

SEQ ID NO: 941 - protein, 7 aa, synthetic construct
DNNKRPS

SEQ ID NO: 942 - protein, 7 aa, synthetic construct
VASSLQS

SEQ ID NO: 943 - protein, 11 aa, synthetic construct
ATFDDSLNGPV

SEQ ID NO: 944 - protein, 9 aa, synthetic construct
LQHNNYPFT

SEQ ID NO: 945 - protein, 9 aa, synthetic construct
LQHNNYPFT

SEQ ID NO: 946 - protein, 8 aa, synthetic construct
QQYDILLT

SEQ ID NO: 947 - protein, 9 aa, synthetic construct
QQYYSTPWT

SEQ ID NO: 948 - protein, 9 aa, synthetic construct
QQYYSTPWT

SEQ ID NO: 949 - protein, 9 aa, synthetic construct
QQYYRTPWT

SEQ ID NO: 950 - protein, 9 aa, synthetic construct
QQYYRTPWT

SEQ ID NO: 951 - protein, 9 aa, synthetic construct
QQYGSSPLT

SEQ ID NO: 952 - protein, 9 aa, synthetic construct
QQYNNWPLT

SEQ ID NO: 953 - protein, 9 aa, synthetic construct
LQHNSYPFT

SEQ ID NO: 954 - protein, 8 aa, synthetic construct
QQYDDLFT

SEQ ID NO: 955 - protein, 9 aa, synthetic construct
QQTNSFPPT

SEQ ID NO: 956 - protein, 9 aa, synthetic construct
QQTNSFPPT

SEQ ID NO: 957 - protein, 9 aa, synthetic construct
LQHNSYPFT

SEQ ID NO: 958 - protein, 9 aa, synthetic construct
LQHNSYPFT

SEQ ID NO: 959 - protein, 9 aa, synthetic construct
LQHNSYPFT

SEQ ID NO: 960 - protein, 9 aa, synthetic construct
LQHNSYPFT

SEQ ID NO: 961 - protein, 9 aa, synthetic construct
LQHNSYPFT

SEQ ID NO: 962 - protein, 9 aa, synthetic construct
LQHNSYPFT

SEQ ID NO: 963 - protein, 9 aa, synthetic construct
LQHNNYPFT

SEQ ID NO: 964 - protein, 9 aa, synthetic construct
LQHNNYPFT

SEQ ID NO: 965 - protein, 9 aa, synthetic construct
LQHNNYPFT

SEQ ID NO: 966 - protein, 9 aa, synthetic construct
LQHNNYPFT

SEQ ID NO: 967 - protein, 9 aa, synthetic construct
LQHNNYPFT

SEQ ID NO: 968 - protein, 9 aa, synthetic construct
LQHNNYPFT

SEQ ID NO: 969 - protein, 9 aa, synthetic construct
LQHNNYPFT

SEQ ID NO: 970 - protein, 9 aa, synthetic construct
LQHNNYPFT

SEQ ID NO: 971 - protein, 9 aa, synthetic construct
LQHNNYPFT

SEQ ID NO: 972 - protein, 9 aa, synthetic construct
LQHNNYPFT

SEQ ID NO: 973 - protein, 9 aa, synthetic construct
LQHNNYPFT

SEQ ID NO: 974 - protein, 9 aa, synthetic construct
LQHNNYPFT

SEQ ID NO: 975 - protein, 9 aa, synthetic construct
LQHNNYPFT

SEQ ID NO: 976 - protein, 9 aa, synthetic construct
LQHNNYPFT

SEQ ID NO: 977 - protein, 9 aa, synthetic construct
LQHNNYPFT

SEQ ID NO: 978 - protein, 9 aa, synthetic construct
LQHNNYPFT

SEQ ID NO: 979 - protein, 9 aa, synthetic construct
LQHNNYPFT

SEQ ID NO: 980 - protein, 9 aa, synthetic construct
LQHNNYPFT

SEQ ID NO: 981 - protein, 9 aa, synthetic construct
LQHNNYPFT

SEQ ID NO: 982 - protein, 8 aa, synthetic construct
QQYDILLT

SEQ ID NO: 983 - protein, 8 aa, synthetic construct
QQYDILLT

SEQ ID NO: 984 - protein, 8 aa, synthetic construct
QQYDILLT

SEQ ID NO: 985 - protein, 8 aa, synthetic construct
QQYDILLT

SEQ ID NO: 986 - protein, 8 aa, synthetic construct
QQYDILLT

SEQ ID NO: 987 - protein, 8 aa, synthetic construct
QQYDILLT

SEQ ID NO: 988 - protein, 8 aa, synthetic construct
QQYDILLT

SEQ ID NO: 989 - protein, 8 aa, synthetic construct
QQYDILLT

SEQ ID NO: 990 - protein, 8 aa, synthetic construct
QQYDILLT

SEQ ID NO: 991 - protein, 9 aa, synthetic construct
LQHNNYPFT

SEQ ID NO: 992 - protein, 9 aa, synthetic construct
LQHNNYPFT

SEQ ID NO: 993 - protein, 9 aa, synthetic construct
LQHNNYPFT

SEQ ID NO: 994 - protein, 9 aa, synthetic construct
LQHNNYPFT

SEQ ID NO: 995 - protein, 9 aa, synthetic construct
LQHNNYPFT

SEQ ID NO: 996 - protein, 9 aa, synthetic construct
LQHNNYPFT

SEQ ID NO: 997 - protein, 9 aa, synthetic construct
LQHNNYPFT

SEQ ID NO: 998 - protein, 8 aa, synthetic construct
QQYDDLFT

SEQ ID NO: 999 - protein, 8 aa, synthetic construct
QQYDDLFT

SEQ ID NO: 1000 - protein, 8 aa, synthetic construct
QQYDDLFT

SEQ ID NO: 1001 - protein, 8 aa, synthetic construct
QQYDDLFT

SEQ ID NO: 1002 - protein, 8 aa, synthetic construct
QQYDDLFT

SEQ ID NO: 1003 - protein, 8 aa, synthetic construct
QQYDDLFT

SEQ ID NO: 1004 - protein, 8 aa, synthetic construct
QQYDDLFT

SEQ ID NO: 1005 - protein, 8 aa, synthetic construct
QQYDDLFT

SEQ ID NO: 1006 - protein, 8 aa, synthetic construct
QQYDDLFT

SEQ ID NO: 1007 - protein, 8 aa, synthetic construct
QQYDDLFT

SEQ ID NO: 1008 - protein, 8 aa, synthetic construct
QQYDDLFT

SEQ ID NO: 1009 - protein, 8 aa, synthetic construct
QQYGSSPR

SEQ ID NO: 1010 - protein, 8 aa, synthetic construct
QQYGSSPR

SEQ ID NO: 1011 - protein, 8 aa, synthetic construct
QQYGSSPR

SEQ ID NO: 1012 - protein, 8 aa, synthetic construct
QQYGSSPR

SEQ ID NO: 1013 - protein, 9 aa, synthetic construct
QQYNNWPLT

SEQ ID NO: 1014 - protein, 9 aa, synthetic construct
QQYNNWPLT

SEQ ID NO: 1015 - protein, 9 aa, synthetic construct
QQYNNWPLT

SEQ ID NO: 1016 - protein, 9 aa, synthetic construct
QQYNNWPLT

SEQ ID NO: 1017 - protein, 9 aa, synthetic construct
QQYNNFPLT

SEQ ID NO: 1018 - protein, 9 aa, synthetic construct
QQYNNYPLT

SEQ ID NO: 1019 - protein, 9 aa, synthetic construct
QQYNNWPLT

SEQ ID NO: 1020 - protein, 9 aa, synthetic construct
QQYNNWPLT

SEQ ID NO: 1021 - protein, 9 aa, synthetic construct
QQYGSSPLT

SEQ ID NO: 1022 - protein, 9 aa, synthetic construct
QQYGSSPLT

SEQ ID NO: 1023 - protein, 9 aa, synthetic construct
QQYGSSPLT

SEQ ID NO: 1024 - protein, 9 aa, synthetic construct
QQYGSSPLT

SEQ ID NO: 1025 - protein, 9 aa, synthetic construct
QQYGSSPLT

SEQ ID NO: 1026 - protein, 9 aa, synthetic construct
QQYGSSPLT

SEQ ID NO: 1027 - protein, 9 aa, synthetic construct
QQYGSSPLT

SEQ ID NO: 1028 - protein, 9 aa, synthetic construct
QQYYSTPWT

SEQ ID NO: 1029 - protein, 9 aa, synthetic construct
QQYYSTPWT

SEQ ID NO: 1030 - protein, 9 aa, synthetic construct
QQYYSTPWT

SEQ ID NO: 1031 - protein, 9 aa, synthetic construct
QQYYSTPWT

SEQ ID NO: 1032 - protein, 9 aa, synthetic construct
QQYYSTPWT

SEQ ID NO: 1033 - protein, 9 aa, synthetic construct
QQYYSTPWT

SEQ ID NO: 1034 - protein, 9 aa, synthetic construct
QQYYSTPWT

SEQ ID NO: 1035 - protein, 9 aa, synthetic construct
QQYYSTPWT

SEQ ID NO: 1036 - protein, 9 aa, synthetic construct
QQYYSTPWT

SEQ ID NO: 1037 - protein, 9 aa, synthetic construct
QQYYSTPWT

SEQ ID NO: 1038 - protein, 9 aa, synthetic construct
QQYYSTPWT

SEQ ID NO: 1039 - protein, 9 aa, synthetic construct
QQYYRTPWT

SEQ ID NO: 1040 - protein, 9 aa, synthetic construct
QQYYRTPWT

SEQ ID NO: 1041 - protein, 9 aa, synthetic construct
QQYYRTPWT

SEQ ID NO: 1042 - protein, 9 aa, synthetic construct
QQYYRTPWT

SEQ ID NO: 1043 - protein, 9 aa, synthetic construct
QQYYRTPWT

SEQ ID NO: 1044 - protein, 9 aa, synthetic construct
QQYYRTPWT

SEQ ID NO: 1045 - protein, 9 aa, synthetic construct
QQYYRTPWT

SEQ ID NO: 1046 - protein, 9 aa, synthetic construct
QQYYRTPWT

SEQ ID NO: 1047 - protein, 9 aa, synthetic construct
QQYYRTPWT

SEQ ID NO: 1048 - protein, 9 aa, synthetic construct
QQYYSTPWT

SEQ ID NO: 1049 - protein, 9 aa, synthetic construct
QQYYSTPWT

SEQ ID NO: 1050 - protein, 9 aa, synthetic construct
QQYYSTPWT

SEQ ID NO: 1051 - protein, 9 aa, synthetic construct
QQYYSTPWT

SEQ ID NO: 1052 - protein, 9 aa, synthetic construct
QQYYSTPWT

SEQ ID NO: 1053 - protein, 9 aa, synthetic construct
QQYYRTPWT

SEQ ID NO: 1054 - protein, 9 aa, synthetic construct
QQYYRTPWT

SEQ ID NO: 1055 - protein, 9 aa, synthetic construct
QQYYRTPWT

SEQ ID NO: 1056 - protein, 9 aa, synthetic construct
QQYYRTPWT

SEQ ID NO: 1057 - protein, 9 aa, synthetic construct
QQYYRTPWT

SEQ ID NO: 1058 - protein, 9 aa, synthetic construct
QQYYRTPWT

SEQ ID NO: 1059 - protein, 9 aa, synthetic construct
QQYYRTPWT

SEQ ID NO: 1060 - protein, 9 aa, synthetic construct
QQYYRTPWT

SEQ ID NO: 1061 - protein, 9 aa, synthetic construct
QQYYRTPWT

SEQ ID NO: 1062 - protein, 9 aa, synthetic construct
QQYYRTPWT

SEQ ID NO: 1063 - protein, 9 aa, synthetic construct
QQYYRTPWT

SEQ ID NO: 1064 - protein, 9 aa, synthetic construct
QQYYRTPWT

SEQ ID NO: 1065 - protein, 9 aa, synthetic construct
QQYYRTPWT

SEQ ID NO: 1066 - protein, 11 aa, synthetic construct
ATFDESLSGPV

SEQ ID NO: 1067 - protein, 11 aa, synthetic construct
ATFDESLQGPV

SEQ ID NO: 1068 - protein, 11 aa, synthetic construct
ATFDESLSGPV

SEQ ID NO: 1069 - protein, 11 aa, synthetic construct
ATFDESLQGPV

SEQ ID NO: 1070 - protein, 11 aa, synthetic construct
ATFDDSLNGPV

SEQ ID NO: 1071 - protein, 11 aa, synthetic construct
ATFDDSLNGPV

SEQ ID NO: 1072 - protein, 11 aa, synthetic construct
ATFDESLNGPV

SEQ ID NO: 1073 - protein, 11 aa, synthetic construct
ATFDDSLQGPV

SEQ ID NO: 1074 - protein, 11 aa, synthetic construct
ATFDDSLSGPV

SEQ ID NO: 1075 - protein, 11 aa, synthetic construct
ATFDDSLNAPV

SEQ ID NO: 1076 - protein, 11 aa, synthetic construct
ATFDSSLNGPV

SEQ ID NO: 1077 - protein, 11 aa, synthetic construct
ATFDSSLNAPV

SEQ ID NO: 1078 - protein, 11 aa, synthetic construct
ATFDSSLNAPV

SEQ ID NO: 1079 - protein, 11 aa, synthetic construct
ATFDESLSGPV

SEQ ID NO: 1080 - protein, 9 aa, synthetic construct
LQHNNYPFT

SEQ ID NO: 1081 - protein, 9 aa, synthetic construct
LQHNNYPFT

SEQ ID NO: 1082 - protein, 11 aa, synthetic construct
ATFDSSLSGPV

SEQ ID NO: 1083 - protein, 9 aa, synthetic construct
QQSYSTLIS

SEQ ID NO: 1084 - protein, 11 aa, synthetic construct
GTWDSSLSAVV

SEQ ID NO: 1085 - protein, 9 aa, synthetic construct
QQSYSTLIS

SEQ ID NO: 1086 - protein, 9 aa, synthetic construct
QQSYSTLIS

SEQ ID NO: 1087 - protein, 9 aa, synthetic construct
QQSYSTLIS

SEQ ID NO: 1088 - protein, 9 aa, synthetic construct
QQSYSTLIS

SEQ ID NO: 1089 - protein, 9 aa, synthetic construct
QQSYSTLIS

SEQ ID NO: 1090 - protein, 9 aa, synthetic construct
QQSYSTLIS

SEQ ID NO: 1091 - protein, 11 aa, synthetic construct
GTWDSSLSAVV

SEQ ID NO: 1092 - protein, 11 aa, synthetic construct
GTWDSSLSAVV

SEQ ID NO: 1093 - protein, 11 aa, synthetic construct
GTWDSSLSAVV

SEQ ID NO: 1094 - protein, 11 aa, synthetic construct
GTFESSLSAVV

SEQ ID NO: 1095 - protein, 11 aa, synthetic construct
GTWDSSLSAVV

SEQ ID NO: 1096 - protein, 11 aa, synthetic construct
GTWDSSLSAVV

SEQ ID NO: 1097 - protein, 11 aa, synthetic construct
GTWDSSLSAVV

SEQ ID NO: 1098 - protein, 11 aa, synthetic construct
GTFESSLSAVV

SEQ ID NO: 1099 - protein, 9 aa, synthetic construct
QQSYSTLLS

SEQ ID NO: 1100 - protein, 5 aa, synthetic construct
GYYMH

SEQ ID NO: 1101 - protein, 5 aa, synthetic construct
NFGMH

SEQ ID NO: 1102 - protein, 5 aa, synthetic construct
YFGMH

SEQ ID NO: 1103 - protein, 5 aa, synthetic construct
SYGMH

SEQ ID NO: 1104 - protein, 5 aa, synthetic construct
GYYIH

SEQ ID NO: 1105 - protein, 5 aa, synthetic construct
GYYIH

SEQ ID NO: 1106 - protein, 5 aa, synthetic construct
GYYIH

SEQ ID NO: 1107 - protein, 5 aa, synthetic construct
GYYIH

SEQ ID NO: 1108 - protein, 7 aa, synthetic construct
SGGYYWS

SEQ ID NO: 1109 - protein, 5 aa, synthetic construct
NYGMH

SEQ ID NO: 1110 - protein, 5 aa, synthetic construct
YFGMH

SEQ ID NO: 1111 - protein, 5 aa, synthetic construct
SYGMH

SEQ ID NO: 1112 - protein, 5 aa, synthetic construct
SYYWS

SEQ ID NO: 1113 - protein, 5 aa, synthetic construct
SYYWS

SEQ ID NO: 1114 - protein, 5 aa, synthetic construct
YFGMH

SEQ ID NO: 1115 - protein, 5 aa, synthetic construct
YFGMH

SEQ ID NO: 1116 - protein, 5 aa, synthetic construct
YFGMH

SEQ ID NO: 1117 - protein, 5 aa, synthetic construct
YFGMH

SEQ ID NO: 1118 - protein, 5 aa, synthetic construct
YFGMH

SEQ ID NO: 1119 - protein, 5 aa, synthetic construct
YFGMH

SEQ ID NO: 1120 - protein, 5 aa, synthetic construct
NFGMH

SEQ ID NO: 1121 - protein, 5 aa, synthetic construct
NFGMH

SEQ ID NO: 1122 - protein, 5 aa, synthetic construct
NFGMH

SEQ ID NO: 1123 - protein, 5 aa, synthetic construct
NFGMH

SEQ ID NO: 1124 - protein, 5 aa, synthetic construct
NFGMH

SEQ ID NO: 1125 - protein, 5 aa, synthetic construct
NFGMH

SEQ ID NO: 1126 - protein, 5 aa, synthetic construct
NFGMH

SEQ ID NO: 1127 - protein, 5 aa, synthetic construct
NFGMH

SEQ ID NO: 1128 - protein, 5 aa, synthetic construct
NFGMH

SEQ ID NO: 1129 - protein, 5 aa, synthetic construct
NFGMH

SEQ ID NO: 1130 - protein, 5 aa, synthetic construct
NFGMH

SEQ ID NO: 1131 - protein, 5 aa, synthetic construct
NFGMH

SEQ ID NO: 1132 - protein, 5 aa, synthetic construct
NFGMH

SEQ ID NO: 1133 - protein, 5 aa, synthetic construct
NFGMH

SEQ ID NO: 1134 - protein, 5 aa, synthetic construct
NFGMH

SEQ ID NO: 1135 - protein, 5 aa, synthetic construct
NFGMH

SEQ ID NO: 1136 - protein, 5 aa, synthetic construct
NFGMH

SEQ ID NO: 1137 - protein, 5 aa, synthetic construct
NFGMH

SEQ ID NO: 1138 - protein, 5 aa, synthetic construct
NFGMH

SEQ ID NO: 1139 - protein, 5 aa, synthetic construct
SYGMH

SEQ ID NO: 1140 - protein, 5 aa, synthetic construct
SYGMH

SEQ ID NO: 1141 - protein, 5 aa, synthetic construct
SYGMH

SEQ ID NO: 1142 - protein, 5 aa, synthetic construct
SYGMH

SEQ ID NO: 1143 - protein, 5 aa, synthetic construct
SYGMH

SEQ ID NO: 1144 - protein, 5 aa, synthetic construct
SYGMH

SEQ ID NO: 1145 - protein, 5 aa, synthetic construct
SYGMH

SEQ ID NO: 1146 - protein, 5 aa, synthetic construct
SYGMH

SEQ ID NO: 1147 - protein, 5 aa, synthetic construct
SYGMH

SEQ ID NO: 1148 - protein, 5 aa, synthetic construct
YFGMH

SEQ ID NO: 1149 - protein, 5 aa, synthetic construct
YFGMH

SEQ ID NO: 1150 - protein, 5 aa, synthetic construct
YFGMH

SEQ ID NO: 1151 - protein, 5 aa, synthetic construct
YFGMH

SEQ ID NO: 1152 - protein, 5 aa, synthetic construct
YFGMH

SEQ ID NO: 1153 - protein, 5 aa, synthetic construct
YFGMH

SEQ ID NO: 1154 - protein, 5 aa, synthetic construct
YFGMH

SEQ ID NO: 1155 - protein, 5 aa, synthetic construct
SYGMH

SEQ ID NO: 1156 - protein, 5 aa, synthetic construct
SYGMH

SEQ ID NO: 1157 - protein, 5 aa, synthetic construct
SYGMH

SEQ ID NO: 1158 - protein, 5 aa, synthetic construct
SYGMH

SEQ ID NO: 1159 - protein, 5 aa, synthetic construct
SYGMH

SEQ ID NO: 1160 - protein, 5 aa, synthetic construct
SYGMH

SEQ ID NO: 1161 - protein, 5 aa, synthetic construct
SYGMH

SEQ ID NO: 1162 - protein, 5 aa, synthetic construct
SYGMH

SEQ ID NO: 1163 - protein, 5 aa, synthetic construct
SYGMH

SEQ ID NO: 1164 - protein, 5 aa, synthetic construct
SYGMH

SEQ ID NO: 1165 - protein, 5 aa, synthetic construct
SYGMH

SEQ ID NO: 1166 - protein, 5 aa, synthetic construct
SYGMH

SEQ ID NO: 1167 - protein, 5 aa, synthetic construct
SYGMH

SEQ ID NO: 1168 - protein, 5 aa, synthetic construct
SYGMH

SEQ ID NO: 1169 - protein, 5 aa, synthetic construct
SYGMH

SEQ ID NO: 1170 - protein, 5 aa, synthetic construct
NYGMH

SEQ ID NO: 1171 - protein, 5 aa, synthetic construct
NYGMH

SEQ ID NO: 1172 - protein, 5 aa, synthetic construct
NYGMH

SEQ ID NO: 1173 - protein, 5 aa, synthetic construct
NYGMH

SEQ ID NO: 1174 - protein, 5 aa, synthetic construct
NYGMH

SEQ ID NO: 1175 - protein, 5 aa, synthetic construct
NYGMH

SEQ ID NO: 1176 - protein, 5 aa, synthetic construct
NYGMH

SEQ ID NO: 1177 - protein, 5 aa, synthetic construct
NYGMH

SEQ ID NO: 1178 - protein, 7 aa, synthetic construct
SGGYYWS

SEQ ID NO: 1179 - protein, 7 aa, synthetic construct
SGGYYWS

SEQ ID NO: 1180 - protein, 7 aa, synthetic construct
SGGYYWS

SEQ ID NO: 1181 - protein, 7 aa, synthetic construct
SGGYYWS

SEQ ID NO: 1182 - protein, 7 aa, synthetic construct
SGGYYWS

SEQ ID NO: 1183 - protein, 7 aa, synthetic construct
SGGYYWS

SEQ ID NO: 1184 - protein, 7 aa, synthetic construct
SGGYYWS

SEQ ID NO: 1185 - protein, 5 aa, synthetic construct
GYYIH

SEQ ID NO: 1186 - protein, 5 aa, synthetic construct
GYYIH

SEQ ID NO: 1187 - protein, 5 aa, synthetic construct
GYYIH

SEQ ID NO: 1188 - protein, 5 aa, synthetic construct
GYYIH

SEQ ID NO: 1189 - protein, 5 aa, synthetic construct
GYYIH

SEQ ID NO: 1190 - protein, 5 aa, synthetic construct
GYYIH

SEQ ID NO: 1191 - protein, 5 aa, synthetic construct
GYYIH

SEQ ID NO: 1192 - protein, 5 aa, synthetic construct
GYYIH

SEQ ID NO: 1193 - protein, 5 aa, synthetic construct
GYYIH

SEQ ID NO: 1194 - protein, 5 aa, synthetic construct
GYYIH

SEQ ID NO: 1195 - protein, 5 aa, synthetic construct
GYYIH

SEQ ID NO: 1196 - protein, 5 aa, synthetic construct
GYYIH

SEQ ID NO: 1197 - protein, 5 aa, synthetic construct
GYYIH

SEQ ID NO: 1198 - protein, 5 aa, synthetic construct
GYYIH

SEQ ID NO: 1199 - protein, 5 aa, synthetic construct
GYYIH

SEQ ID NO: 1200 - protein, 5 aa, synthetic construct
GYYIH

SEQ ID NO: 1201 - protein, 5 aa, synthetic construct
GYYIH

SEQ ID NO: 1202 - protein, 5 aa, synthetic construct
GYYIH

SEQ ID NO: 1203 - protein, 5 aa, synthetic construct
GYYIH

SEQ ID NO: 1204 - protein, 5 aa, synthetic construct
GYYIH

SEQ ID NO: 1205 - protein, 5 aa, synthetic construct
GYYIH

SEQ ID NO: 1206 - protein, 5 aa, synthetic construct
GYYIH

SEQ ID NO: 1207 - protein, 5 aa, synthetic construct
GYYIH

SEQ ID NO: 1208 - protein, 5 aa, synthetic construct
GYYIH

SEQ ID NO: 1209 - protein, 5 aa, synthetic construct
GYYIH

SEQ ID NO: 1210 - protein, 5 aa, synthetic construct
GYYIH

SEQ ID NO: 1211 - protein, 5 aa, synthetic construct
GYYIH

SEQ ID NO: 1212 - protein, 5 aa, synthetic construct
GYYIH

SEQ ID NO: 1213 - protein, 5 aa, synthetic construct
GYYIH

SEQ ID NO: 1214 - protein, 5 aa, synthetic construct
GYYIH

SEQ ID NO: 1215 - protein, 5 aa, synthetic construct
GYYIH

SEQ ID NO: 1216 - protein, 5 aa, synthetic construct
GYYIH

SEQ ID NO: 1217 - protein, 5 aa, synthetic construct
GYYIH

SEQ ID NO: 1218 - protein, 5 aa, synthetic construct
GYYIH

SEQ ID NO: 1219 - protein, 5 aa, synthetic construct
GYYIH

SEQ ID NO: 1220 - protein, 5 aa, synthetic construct
GYYIH

SEQ ID NO: 1221 - protein, 5 aa, synthetic construct
GYYIH

SEQ ID NO: 1222 - protein, 5 aa, synthetic construct
GYYIH

SEQ ID NO: 1223 - protein, 5 aa, synthetic construct
GYYMH

SEQ ID NO: 1224 - protein, 5 aa, synthetic construct
GYYMH

SEQ ID NO: 1225 - protein, 5 aa, synthetic construct
GYYMH

SEQ ID NO: 1226 - protein, 5 aa, synthetic construct
GYYMH

SEQ ID NO: 1227 - protein, 5 aa, synthetic construct
GYYMH

SEQ ID NO: 1228 - protein, 5 aa, synthetic construct
GYYMH

SEQ ID NO: 1229 - protein, 5 aa, synthetic construct
GYYMH

SEQ ID NO: 1230 - protein, 5 aa, synthetic construct
GYYMH

SEQ ID NO: 1231 - protein, 5 aa, synthetic construct
GYYMH

SEQ ID NO: 1232 - protein, 5 aa, synthetic construct
GYYMH

SEQ ID NO: 1233 - protein, 5 aa, synthetic construct
GYYMH

SEQ ID NO: 1234 - protein, 5 aa, synthetic construct
GYYMH

SEQ ID NO: 1235 - protein, 5 aa, synthetic construct
GYYMH

SEQ ID NO: 1236 - protein, 5 aa, synthetic construct
GYYMH

SEQ ID NO: 1237 - protein, 5 aa, synthetic construct
NFGMH

SEQ ID NO: 1238 - protein, 5 aa, synthetic construct
YFGMH

SEQ ID NO: 1239 - protein, 5 aa, synthetic construct
GYYMH

SEQ ID NO: 1240 - protein, 5 aa, synthetic construct
SYGIH

SEQ ID NO: 1241 - protein, 5 aa, synthetic construct
SYDIN

SEQ ID NO: 1242 - protein, 5 aa, synthetic construct
SYGIH

SEQ ID NO: 1243 - protein, 5 aa, synthetic construct
SYGIH

SEQ ID NO: 1244 - protein, 5 aa, synthetic construct
SYGIH

SEQ ID NO: 1245 - protein, 5 aa, synthetic construct
SYGIH

SEQ ID NO: 1246 - protein, 5 aa, synthetic construct
SYGIH

SEQ ID NO: 1247 - protein, 5 aa, synthetic construct
SYGIH

SEQ ID NO: 1248 - protein, 5 aa, synthetic construct
SYDIN

SEQ ID NO: 1249 - protein, 5 aa, synthetic construct
SYDIN

SEQ ID NO: 1250 - protein, 5 aa, synthetic construct
SYDIN

SEQ ID NO: 1251 - protein, 5 aa, synthetic construct
SYDIN

SEQ ID NO: 1252 - protein, 5 aa, synthetic construct
SYDIN

SEQ ID NO: 1253 - protein, 5 aa, synthetic construct
SYDIN

SEQ ID NO: 1254 - protein, 5 aa, synthetic construct
SYDIN

SEQ ID NO: 1255 - protein, 5 aa, synthetic construct
SYDIN

SEQ ID NO: 1256 - protein, 5 aa, synthetic construct
SYGIH

SEQ ID NO: 1257 - protein, 17 aa, synthetic construct
WINPNSGGTNYAQKFQG

SEQ ID NO: 1258 - protein, 17 aa, synthetic construct
VIWYDGSNENYADSVKG

SEQ ID NO: 1259 - protein, 17 aa, synthetic construct
VIWYDGSNKYYADSVKG

SEQ ID NO: 1260 - protein, 17 aa, synthetic construct
VIWYDGSNKYYADSVKG

SEQ ID NO: 1261 - protein, 17 aa, synthetic construct
WINPDSGGTDYSQRFQG

SEQ ID NO: 1262 - protein, 17 aa, synthetic construct
WINPDSGGTDYSQRFQG

SEQ ID NO: 1263 - protein, 17 aa, synthetic construct
WISPNSGDTSYAQKFQD

SEQ ID NO: 1264 - protein, 17 aa, synthetic construct
WISPNNGDTNYAQKFQD

SEQ ID NO: 1265 - protein, 16 aa, synthetic construct
YIYYSGSTYYNPSLKS

SEQ ID NO: 1266 - protein, 17 aa, synthetic construct
AIWFDGSDKYYADSVKG

SEQ ID NO: 1267 - protein, 17 aa, synthetic construct
VIWYDGSNKYYADSVKG

SEQ ID NO: 1268 - protein, 17 aa, synthetic construct
AIWYDGNNKYYADSVKG

SEQ ID NO: 1269 - protein, 16 aa, synthetic construct
RIYTSGSTNYNPSLKS

SEQ ID NO: 1270 - protein, 16 aa, synthetic construct
RIYTSGSTNYNPSLKS

SEQ ID NO: 1271 - protein, 17 aa, synthetic construct
VIWYDASNKYYADAVKG

SEQ ID NO: 1272 - protein, 17 aa, synthetic construct
VIWYDASNKYYADSVKG

SEQ ID NO: 1273 - protein, 17 aa, synthetic construct
VIWYDGSNKYYADAVKG

SEQ ID NO: 1274 - protein, 17 aa, synthetic construct
VIWYDASNKYYADAVKG

SEQ ID NO: 1275 - protein, 17 aa, synthetic construct
VIWYDASNKYYADAVKG

SEQ ID NO: 1276 - protein, 17 aa, synthetic construct
VIWYDASNKYYADAVKG

SEQ ID NO: 1277 - protein, 17 aa, synthetic construct
VIWYDASNENYADAVKG

SEQ ID NO: 1278 - protein, 17 aa, synthetic construct
VIWYDASNENYADAVKG

SEQ ID NO: 1279 - protein, 17 aa, synthetic construct
VIWYDASNENYADAVKG

SEQ ID NO: 1280 - protein, 17 aa, synthetic construct
VIWYDASNENYADSVKG

SEQ ID NO: 1281 - protein, 17 aa, synthetic construct
VIWYDGSNENYADAVKG

SEQ ID NO: 1282 - protein, 17 aa, synthetic construct
VIWYDASNENYADAVKG

SEQ ID NO: 1283 - protein, 17 aa, synthetic construct
VIWYDASNENYADAVKG

SEQ ID NO: 1284 - protein, 17 aa, synthetic construct
VIWYDGSNENYADSVKG

SEQ ID NO: 1285 - protein, 17 aa, synthetic construct
VIWYDASNENYADAVKG

SEQ ID NO: 1286 - protein, 17 aa, synthetic construct
VIWYDASNENYADAVKG

SEQ ID NO: 1287 - protein, 17 aa, synthetic construct
VIWYDASNENYADAVKG

SEQ ID NO: 1288 - protein, 17 aa, synthetic construct
VIWYDASNENYADAVKG

SEQ ID NO: 1289 - protein, 17 aa, synthetic construct
VIWYDASNENYADAVKG

SEQ ID NO: 1290 - protein, 17 aa, synthetic construct
VIWYDASNENYADAVKG

SEQ ID NO: 1291 - protein, 17 aa, synthetic construct
VIWYDASNENYADAVKG

SEQ ID NO: 1292 - protein, 17 aa, synthetic construct
VIWYDGSNENYADAVKG

SEQ ID NO: 1293 - protein, 17 aa, synthetic construct
VIWYDASNENYADSVKG

SEQ ID NO: 1294 - protein, 17 aa, synthetic construct
VIWYDASNENYADAVKG

SEQ ID NO: 1295 - protein, 17 aa, synthetic construct
VIWYDASNENYADAVKG

SEQ ID NO: 1296 - protein, 17 aa, synthetic construct
VIWYDASNKYYADAVKG

SEQ ID NO: 1297 - protein, 17 aa, synthetic construct
VIWYDASNKYYADAVKG

SEQ ID NO: 1298 - protein, 17 aa, synthetic construct
VIWYDASNKYYADAVKG

SEQ ID NO: 1299 - protein, 17 aa, synthetic construct
VIWYDASNKYYADAVKG

SEQ ID NO: 1300 - protein, 17 aa, synthetic construct
VIWYDASNKYYADAVKG

SEQ ID NO: 1301 - protein, 17 aa, synthetic construct
VIWYDASNKYYADAVKG

SEQ ID NO: 1302 - protein, 17 aa, synthetic construct
VIWYDASNKYYADAVKG

SEQ ID NO: 1303 - protein, 17 aa, synthetic construct
VIWYDASNKYYADSVKG

SEQ ID NO: 1304 - protein, 17 aa, synthetic construct
VIWYDGSNKYYADAVKG

SEQ ID NO: 1305 - protein, 17 aa, synthetic construct
VIWYDASNKYYADAVKG

SEQ ID NO: 1306 - protein, 17 aa, synthetic construct
VIWYDASNKYYADAVKG

SEQ ID NO: 1307 - protein, 17 aa, synthetic construct
VIWYDASNKYYADAVKG

SEQ ID NO: 1308 - protein, 17 aa, synthetic construct
VIWYDASNKYYADAVKG

SEQ ID NO: 1309 - protein, 17 aa, synthetic construct
VIWYDGSNKYYADSVKG

SEQ ID NO: 1310 - protein, 17 aa, synthetic construct
VIWYDASNKYYADSVKG

SEQ ID NO: 1311 - protein, 17 aa, synthetic construct
VIWYDGSNKYYADAVKG

SEQ ID NO: 1312 - protein, 17 aa, synthetic construct
AIWYDANNKYYADAVKG

SEQ ID NO: 1313 - protein, 17 aa, synthetic construct
AIWYDANNKYYADAVKG

SEQ ID NO: 1314 - protein, 17 aa, synthetic construct
AIWYDANNKYYADAVKG

SEQ ID NO: 1315 - protein, 17 aa, synthetic construct
AIWYDANNKYYADAVKG

SEQ ID NO: 1316 - protein, 17 aa, synthetic construct
AIWYDANNKYYADAVKG

SEQ ID NO: 1317 - protein, 17 aa, synthetic construct
AIWYDANNKYYADAVKG

SEQ ID NO: 1318 - protein, 17 aa, synthetic construct
AIWYDANNKYYADAVKG

SEQ ID NO: 1319 - protein, 17 aa, synthetic construct
AIWYDGNNKYYADAVKG

SEQ ID NO: 1320 - protein, 17 aa, synthetic construct
AIWYDANNKYYADSVKG

SEQ ID NO: 1321 - protein, 17 aa, synthetic construct
AIWYDANNKYYADAVKG

SEQ ID NO: 1322 - protein, 17 aa, synthetic construct
AIWYDANNKYYADAVKG

SEQ ID NO: 1323 - protein, 17 aa, synthetic construct
VIWYDASNKYYEDAVKG

SEQ ID NO: 1324 - protein, 17 aa, synthetic construct
VIWYDGSNKYYEDSVKG

SEQ ID NO: 1325 - protein, 17 aa, synthetic construct
VIWYDGSNKYYEDAVKG

SEQ ID NO: 1326 - protein, 17 aa, synthetic construct
VIWYDASNKYYEDSVKG

SEQ ID NO: 1327 - protein, 17 aa, synthetic construct
AIWFDASDKYYADAVKG

SEQ ID NO: 1328 - protein, 17 aa, synthetic construct
AIWFDASDKYYADSVKG

SEQ ID NO: 1329 - protein, 17 aa, synthetic construct
AIWFDGSDKYYADAVKG

SEQ ID NO: 1330 - protein, 17 aa, synthetic construct
AIWFDASDKYYADAVKG

SEQ ID NO: 1331 - protein, 17 aa, synthetic construct
AIWFDASDKYYADAVKG

SEQ ID NO: 1332 - protein, 17 aa, synthetic construct
AIWFDASDKYYADAVKG

SEQ ID NO: 1333 - protein, 17 aa, synthetic construct
AIWFDASDKYYADAVKG

SEQ ID NO: 1334 - protein, 17 aa, synthetic construct
AIWFDASDKYYADAVKG

SEQ ID NO: 1335 - protein, 16 aa, synthetic construct
YIYYSGSTYYNPSLKS

SEQ ID NO: 1336 - protein, 16 aa, synthetic construct
YIYYSGSTYYNPSLKS

SEQ ID NO: 1337 - protein, 16 aa, synthetic construct
YIYYSGSTYYNPSLKS

SEQ ID NO: 1338 - protein, 16 aa, synthetic construct
YIYYSGSTYYNPSLKS

SEQ ID NO: 1339 - protein, 16 aa, synthetic construct
YIYYSGSTYYNPSLKS

SEQ ID NO: 1340 - protein, 16 aa, synthetic construct
YIYYSGSTYYNPSLKS

SEQ ID NO: 1341 - protein, 16 aa, synthetic construct
YIYYSGSTYYNPSLKS

SEQ ID NO: 1342 - protein, 17 aa, synthetic construct
WINPESGGTDYSQRFQG

SEQ ID NO: 1343 - protein, 17 aa, synthetic construct
WINPESGGTDYSQRFQG

SEQ ID NO: 1344 - protein, 17 aa, synthetic construct
WINPDAGGTDYSQRFQG

SEQ ID NO: 1345 - protein, 17 aa, synthetic construct
WINPDAGGTDYSQRFQG

SEQ ID NO: 1346 - protein, 17 aa, synthetic construct
WINPDSGGTDYSQRFQG

SEQ ID NO: 1347 - protein, 17 aa, synthetic construct
WINPDSGGTDYSQRFQG

SEQ ID NO: 1348 - protein, 17 aa, synthetic construct
WINPDSGGTDYSQRFQG

SEQ ID NO: 1349 - protein, 17 aa, synthetic construct
WINPDAGGTDYSQRFQG

SEQ ID NO: 1350 - protein, 17 aa, synthetic construct
WINPDAGGTDYSQRFQG

SEQ ID NO: 1351 - protein, 17 aa, synthetic construct
WINPDAGGTDYSQRFQG

SEQ ID NO: 1352 - protein, 17 aa, synthetic construct
WINPESGGTDYSQRFQG

SEQ ID NO: 1353 - protein, 17 aa, synthetic construct
WISPNSGETSYAQKFQD

SEQ ID NO: 1354 - protein, 17 aa, synthetic construct
WISPNSGDTSYAQKFQD

SEQ ID NO: 1355 - protein, 17 aa, synthetic construct
WISPNSGETSYAQKFQD

SEQ ID NO: 1356 - protein, 17 aa, synthetic construct
WISPNSGETSYAQKFQD

SEQ ID NO: 1357 - protein, 17 aa, synthetic construct
WISPNSGDTSYAQKFQD

SEQ ID NO: 1358 - protein, 17 aa, synthetic construct
WISPNSGETSYAQKFQD

SEQ ID NO: 1359 - protein, 17 aa, synthetic construct
WISPNSGDTSYAQKFQD

SEQ ID NO: 1360 - protein, 17 aa, synthetic construct
WISPNSGETSYAQKFQD

SEQ ID NO: 1361 - protein, 17 aa, synthetic construct
WISPNSGETSYAQKFQD

SEQ ID NO: 1362 - protein, 17 aa, synthetic construct
WINPESGGTDYSQRFQG

SEQ ID NO: 1363 - protein, 17 aa, synthetic construct
WINPESGGTDYSQRFQG

SEQ ID NO: 1364 - protein, 17 aa, synthetic construct
WINPDSGGTDYSQRFQG

SEQ ID NO: 1365 - protein, 17 aa, synthetic construct
WINPESGGTDYSQRFQG

SEQ ID NO: 1366 - protein, 17 aa, synthetic construct
WINPESGGTDYSQRFQG

SEQ ID NO: 1367 - protein, 17 aa, synthetic construct
WISPNQGETNYAQKFQD

SEQ ID NO: 1368 - protein, 17 aa, synthetic construct
WISPNQGDTNYAQKFQD

SEQ ID NO: 1369 - protein, 17 aa, synthetic construct
WISPNQGETNYAQKFQD

SEQ ID NO: 1370 - protein, 17 aa, synthetic construct
WISPNNGETNYAQKFQD

SEQ ID NO: 1371 - protein, 17 aa, synthetic construct
WISPNNGDTNYAQKFQD

SEQ ID NO: 1372 - protein, 17 aa, synthetic construct
WISPNQGDTNYAQKFQD

SEQ ID NO: 1373 - protein, 17 aa, synthetic construct
WISPNNGETNYAQKFQD

SEQ ID NO: 1374 - protein, 17 aa, synthetic construct
WISPNQGETNYAQKFQD

SEQ ID NO: 1375 - protein, 17 aa, synthetic construct
WISPNNGDTNYAQKFQD

SEQ ID NO: 1376 - protein, 17 aa, synthetic construct
WISPNQGDTNYAQKFQD

SEQ ID NO: 1377 - protein, 17 aa, synthetic construct
WISPNNGETNYAQKFQD

SEQ ID NO: 1378 - protein, 17 aa, synthetic construct
WISPNQGETNYAQKFQD

SEQ ID NO: 1379 - protein, 17 aa, synthetic construct
WISPNQGETNYAQKFQD

SEQ ID NO: 1380 - protein, 17 aa, synthetic construct
WINPNSGGTNYAQKFQG

SEQ ID NO: 1381 - protein, 17 aa, synthetic construct
WINPNSGGTNYAQKFQG

SEQ ID NO: 1382 - protein, 17 aa, synthetic construct
WINPNSGGTNYAQKFQG

SEQ ID NO: 1383 - protein, 17 aa, synthetic construct
WINPNSGGTNYAQKFQG

SEQ ID NO: 1384 - protein, 17 aa, synthetic construct
WINPNSGGTNYAQKFQG

SEQ ID NO: 1385 - protein, 17 aa, synthetic construct
WINPNSGGTNYAQKFQG

SEQ ID NO: 1386 - protein, 17 aa, synthetic construct
WINPNSGGTNYAQKFQG

SEQ ID NO: 1387 - protein, 17 aa, synthetic construct
WINPNSGGTNYAQKFQG

SEQ ID NO: 1388 - protein, 17 aa, synthetic construct
WINPNSGGTNYAQKFQG

SEQ ID NO: 1389 - protein, 17 aa, synthetic construct
WINPNSGGTNYAQKFQG

SEQ ID NO: 1390 - protein, 17 aa, synthetic construct
WINPNSGGTNYAQKFQG

SEQ ID NO: 1391 - protein, 17 aa, synthetic construct
WINPNSGGTNYAQKFQG

SEQ ID NO: 1392 - protein, 17 aa, synthetic construct
WINPNSGGTNYAQKFQG

SEQ ID NO: 1393 - protein, 17 aa, synthetic construct
WINPNSGGTNYAQKFQG

SEQ ID NO: 1394 - protein, 17 aa, synthetic construct
VIWYDASNENYADAVKG

SEQ ID NO: 1395 - protein, 17 aa, synthetic construct
VIWYDASNKYYADAVKG

SEQ ID NO: 1396 - protein, 17 aa, synthetic construct
WINPNSGGTNYAQKFQG

SEQ ID NO: 1397 - protein, 17 aa, synthetic construct
VIWYDGSNKFHADSVKG

SEQ ID NO: 1398 - protein, 17 aa, synthetic construct
WMNPNSGNTGYAQKFQG

SEQ ID NO: 1399 - protein, 17 aa, synthetic construct
VIWYDASNKFHADAVKG

SEQ ID NO: 1400 - protein, 17 aa, synthetic construct
VIWYDASNKFHADAVKG

SEQ ID NO: 1401 - protein, 17 aa, synthetic construct
VIWYDASNKFHADAVKG

SEQ ID NO: 1402 - protein, 17 aa, synthetic construct
VIWYDASNKFHADAVKG

SEQ ID NO: 1403 - protein, 17 aa, synthetic construct
VIWYDASNKFHADSVKG

SEQ ID NO: 1404 - protein, 17 aa, synthetic construct
VIWYDGSNKFHADAVKG

SEQ ID NO: 1405 - protein, 17 aa, synthetic construct
WMNPNSGGTGYAQKFQG

SEQ ID NO: 1406 - protein, 17 aa, synthetic construct
WMNPNSGNTGYAQKFQG

SEQ ID NO: 1407 - protein, 17 aa, synthetic construct
WMNPNSGGTGYAQKFQG

SEQ ID NO: 1408 - protein, 17 aa, synthetic construct
WMNPNSGGTGYAQKFQG

SEQ ID NO: 1409 - protein, 17 aa, synthetic construct
WMNPNSGGTGYAQKFQG

SEQ ID NO: 1410 - protein, 17 aa, synthetic construct
WMNPNSGNTGYAQKFQG

SEQ ID NO: 1411 - protein, 17 aa, synthetic construct
WMNPNSGGTGYAQKFQG

SEQ ID NO: 1412 - protein, 17 aa, synthetic construct
WMNPNSGGTGYAQKFQG

SEQ ID NO: 1413 - protein, 17 aa, synthetic construct
VIWYDASNKFHADAVKG

SEQ ID NO: 1414 - protein, 19 aa, synthetic construct
GGDYVWGTYRPHYYYGMDV

SEQ ID NO: 1415 - protein, 12 aa, synthetic construct
DGTIFGVVLGDY

SEQ ID NO: 1416 - protein, 12 aa, synthetic construct
DGTIFGVLLGDY

SEQ ID NO: 1417 - protein, 11 aa, synthetic construct
DRTIFGVVLDY

SEQ ID NO: 1418 - protein, 14 aa, synthetic construct
EATIFGMVIVPFDY

SEQ ID NO: 1419 - protein, 14 aa, synthetic construct
EATIFGMVIVPFDY

SEQ ID NO: 1420 - protein, 14 aa, synthetic construct
EATIFGMLIVPFDY

SEQ ID NO: 1421 - protein, 14 aa, synthetic construct
EATIFGMLIVPFDY

SEQ ID NO: 1422 - protein, 16 aa, synthetic construct
DRITIFGVVMGGGMDV

SEQ ID NO: 1423 - protein, 11 aa, synthetic construct
DQAIFGVVPDY

SEQ ID NO: 1424 - protein, 12 aa, synthetic construct
DGTIFGVLLGDY

SEQ ID NO: 1425 - protein, 11 aa, synthetic construct
DRTIFGVVLEY

SEQ ID NO: 1426 - protein, 9 aa, synthetic construct
DVAVAGFDY

SEQ ID NO: 1427 - protein, 9 aa, synthetic construct
DVAVAGFDY

SEQ ID NO: 1428 - protein, 12 aa, synthetic construct
DGTIFGVLLGDY

SEQ ID NO: 1429 - protein, 12 aa, synthetic construct
DGTIFGVLLGDY

SEQ ID NO: 1430 - protein, 12 aa, synthetic construct
DGTIFGVLLGDY

SEQ ID NO: 1431 - protein, 12 aa, synthetic construct
DGTIFGVLLGDY

SEQ ID NO: 1432 - protein, 12 aa, synthetic construct
DGTIFGVLLGDY

SEQ ID NO: 1433 - protein, 12 aa, synthetic construct
DRTIFGVLLGDY

SEQ ID NO: 1434 - protein, 12 aa, synthetic construct
DGTIFGVVLGDY

SEQ ID NO: 1435 - protein, 12 aa, synthetic construct
DGTIFGVVLGDY

SEQ ID NO: 1436 - protein, 12 aa, synthetic construct
DGTIFGVVLGDY

SEQ ID NO: 1437 - protein, 12 aa, synthetic construct
DGTIFGVVLGDY

SEQ ID NO: 1438 - protein, 12 aa, synthetic construct
DGTIFGVVLGDY

SEQ ID NO: 1439 - protein, 12 aa, synthetic construct
DRTIFGVVLGDY

SEQ ID NO: 1440 - protein, 12 aa, synthetic construct
DGTIFGVVLGDY

SEQ ID NO: 1441 - protein, 12 aa, synthetic construct
DGTIFGVVLGDY

SEQ ID NO: 1442 - protein, 12 aa, synthetic construct
DGTIFGVVLGDY

SEQ ID NO: 1443 - protein, 12 aa, synthetic construct
DGTIFGVVLGDY

SEQ ID NO: 1444 - protein, 12 aa, synthetic construct
DGTIFGVVLGDY

SEQ ID NO: 1445 - protein, 12 aa, synthetic construct
DGTIFGVVLGDY

SEQ ID NO: 1446 - protein, 12 aa, synthetic construct
DGTIFGVVLGDY

SEQ ID NO: 1447 - protein, 12 aa, synthetic construct
DGTIFGVVLGDY

SEQ ID NO: 1448 - protein, 12 aa, synthetic construct
DGTIFGVVLGDY

SEQ ID NO: 1449 - protein, 12 aa, synthetic construct
DGTIFGVVLGDY

SEQ ID NO: 1450 - protein, 12 aa, synthetic construct
DGTIFGVVLGDY

SEQ ID NO: 1451 - protein, 12 aa, synthetic construct
DRTIFGVVLGDY

SEQ ID NO: 1452 - protein, 12 aa, synthetic construct
DGTIFGVVLGDY

SEQ ID NO: 1453 - protein, 11 aa, synthetic construct
DRTIFGVVLDY

SEQ ID NO: 1454 - protein, 11 aa, synthetic construct
DRTIFGVVLDY

SEQ ID NO: 1455 - protein, 11 aa, synthetic construct
DRTIFGVVLDY

SEQ ID NO: 1456 - protein, 11 aa, synthetic construct
DRTIFGVVLDY

SEQ ID NO: 1457 - protein, 11 aa, synthetic construct
DRTIFGVVLDY

SEQ ID NO: 1458 - protein, 11 aa, synthetic construct
DRTIFGVVLDY

SEQ ID NO: 1459 - protein, 11 aa, synthetic construct
DRTIFGVVLDY

SEQ ID NO: 1460 - protein, 11 aa, synthetic construct
DRTIFGVVLDY

SEQ ID NO: 1461 - protein, 11 aa, synthetic construct
DRTIFGVVLDY

SEQ ID NO: 1462 - protein, 12 aa, synthetic construct
DGTIFGVLLGDY

SEQ ID NO: 1463 - protein, 12 aa, synthetic construct
DRTIFGVLLGDY

SEQ ID NO: 1464 - protein, 12 aa, synthetic construct
DGTIFGVLLGDY

SEQ ID NO: 1465 - protein, 12 aa, synthetic construct
DRTIFGVLLGDY

SEQ ID NO: 1466 - protein, 12 aa, synthetic construct
DGTIFGVLLGDY

SEQ ID NO: 1467 - protein, 12 aa, synthetic construct
DGTIFGVLLGDY

SEQ ID NO: 1468 - protein, 12 aa, synthetic construct
DGTIFGVLLGDY

SEQ ID NO: 1469 - protein, 11 aa, synthetic construct
DRTIFGVVLEY

SEQ ID NO: 1470 - protein, 11 aa, synthetic construct
DRTIFGVVLEY

SEQ ID NO: 1471 - protein, 11 aa, synthetic construct
DRTIFGVVLEY

SEQ ID NO: 1472 - protein, 11 aa, synthetic construct
DRTIFGVVLEY

SEQ ID NO: 1473 - protein, 11 aa, synthetic construct
DRTIFGVVLEY

SEQ ID NO: 1474 - protein, 11 aa, synthetic construct
DRTIFGVVLEY

SEQ ID NO: 1475 - protein, 11 aa, synthetic construct
DRTIFGVVLEY

SEQ ID NO: 1476 - protein, 11 aa, synthetic construct
DRTIFGVVLEY

SEQ ID NO: 1477 - protein, 11 aa, synthetic construct
DRTIFGVVLEY

SEQ ID NO: 1478 - protein, 11 aa, synthetic construct
DRTIFGVVLEY

SEQ ID NO: 1479 - protein, 11 aa, synthetic construct
DRTIFGVVLEY

SEQ ID NO: 1480 - protein, 11 aa, synthetic construct
GITIFGHGFEY

SEQ ID NO: 1481 - protein, 11 aa, synthetic construct
GITIFGHGFEY

SEQ ID NO: 1482 - protein, 11 aa, synthetic construct
GITIFGHGFEY

SEQ ID NO: 1483 - protein, 11 aa, synthetic construct
GITIFGHGFEY

SEQ ID NO: 1484 - protein, 11 aa, synthetic construct
DQAIFGVVPDY

SEQ ID NO: 1485 - protein, 11 aa, synthetic construct
DQAIFGVVPDY

SEQ ID NO: 1486 - protein, 11 aa, synthetic construct
DQAIFGVVPDY

SEQ ID NO: 1487 - protein, 11 aa, synthetic construct
DQAIFGVVPDY

SEQ ID NO: 1488 - protein, 11 aa, synthetic construct
DQAIFGVVPDY

SEQ ID NO: 1489 - protein, 11 aa, synthetic construct
DQAIFGVVPDY

SEQ ID NO: 1490 - protein, 11 aa, synthetic construct
DQAIFGVVPDY

SEQ ID NO: 1491 - protein, 11 aa, synthetic construct
DQAIFGVVPDY

SEQ ID NO: 1492 - protein, 16 aa, synthetic construct
DRITIFGVVMGGGMDV

SEQ ID NO: 1493 - protein, 16 aa, synthetic construct
DRITIFGVVMGGGMDV

SEQ ID NO: 1494 - protein, 16 aa, synthetic construct
DRITIFGVVMGGGMDV

SEQ ID NO: 1495 - protein, 16 aa, synthetic construct
DRITIFGVVMGGGMDV

SEQ ID NO: 1496 - protein, 16 aa, synthetic construct
DRITIFGVVMGGGMDV

SEQ ID NO: 1497 - protein, 16 aa, synthetic construct
DRITIFGVVMGGGMDV

SEQ ID NO: 1498 - protein, 16 aa, synthetic construct
DRITIFGVVMGGGMDV

SEQ ID NO: 1499 - protein, 14 aa, synthetic construct
EATIFGMVIVPFDY

SEQ ID NO: 1500 - protein, 14 aa, synthetic construct
EATIFGMVIVPFDY

SEQ ID NO: 1501 - protein, 14 aa, synthetic construct
EATIFGMVIVPFDY

SEQ ID NO: 1502 - protein, 14 aa, synthetic construct
EATIFGMVIVPFDY

SEQ ID NO: 1503 - protein, 14 aa, synthetic construct
EATIFGMVIVPFDY

SEQ ID NO: 1504 - protein, 14 aa, synthetic construct
EATIFGMVIVPFDY

SEQ ID NO: 1505 - protein, 14 aa, synthetic construct
EATIFGMVIVPFDY

SEQ ID NO: 1506 - protein, 14 aa, synthetic construct
EATIFGMVIVPFDY

SEQ ID NO: 1507 - protein, 14 aa, synthetic construct
EATIFGMVIVPFDY

SEQ ID NO: 1508 - protein, 14 aa, synthetic construct
EATIFGMVIVPFDY

SEQ ID NO: 1509 - protein, 14 aa, synthetic construct
EATIFGMVIVPFDY

SEQ ID NO: 1510 - protein, 14 aa, synthetic construct
EATIFGMLIVPFDY

SEQ ID NO: 1511 - protein, 14 aa, synthetic construct
EATIFGMLIVPFDY

SEQ ID NO: 1512 - protein, 14 aa, synthetic construct
EATIFGMLIVPFDY

SEQ ID NO: 1513 - protein, 14 aa, synthetic construct
EATIFGMLIVPFDY

SEQ ID NO: 1514 - protein, 14 aa, synthetic construct
EATIFGMLIVPFDY

SEQ ID NO: 1515 - protein, 14 aa, synthetic construct
EATIFGMLIVPFDY

SEQ ID NO: 1516 - protein, 14 aa, synthetic construct
EATIFGMLIVPFDY

SEQ ID NO: 1517 - protein, 14 aa, synthetic construct
EATIFGMLIVPFDY

SEQ ID NO: 1518 - protein, 14 aa, synthetic construct
EATIFGMLIVPFDY

SEQ ID NO: 1519 - protein, 14 aa, synthetic construct
EATIFGMVIVPFDY

SEQ ID NO: 1520 - protein, 14 aa, synthetic construct
EATIFGMVIVPFDY

SEQ ID NO: 1521 - protein, 14 aa, synthetic construct
EATIFGMVIVPFDY

SEQ ID NO: 1522 - protein, 14 aa, synthetic construct
EATIFGMVIVPFDY

SEQ ID NO: 1523 - protein, 14 aa, synthetic construct
EATIFGMVIVPFDY

SEQ ID NO: 1524 - protein, 14 aa, synthetic construct
EATIFGMLIVPFDY

SEQ ID NO: 1525 - protein, 14 aa, synthetic construct
EATIFGMLIVPFDY

SEQ ID NO: 1526 - protein, 14 aa, synthetic construct
EATIFGMLIVPFDY

SEQ ID NO: 1527 - protein, 14 aa, synthetic construct
EATIFGMLIVPFDY

SEQ ID NO: 1528 - protein, 14 aa, synthetic construct
EATIFGMLIVPFDY

SEQ ID NO: 1529 - protein, 14 aa, synthetic construct
EATIFGMLIVPFDY

SEQ ID NO: 1530 - protein, 14 aa, synthetic construct
EATIFGMLIVPFDY

SEQ ID NO: 1531 - protein, 14 aa, synthetic construct
EATIFGMLIVPFDY

SEQ ID NO: 1532 - protein, 14 aa, synthetic construct
EATIFGMLIVPFDY

SEQ ID NO: 1533 - protein, 14 aa, synthetic construct
EATIFGMLIVPFDY

SEQ ID NO: 1534 - protein, 14 aa, synthetic construct
EATIFGMLIVPFDY

SEQ ID NO: 1535 - protein, 14 aa, synthetic construct
EATIFGMLIVPFDY

SEQ ID NO: 1536 - protein, 14 aa, synthetic construct
EATIFGMLIVPFDY

SEQ ID NO: 1537 - protein, 19 aa, synthetic construct
GGDYVWGTYRPHYYYGMDV

SEQ ID NO: 1538 - protein, 19 aa, synthetic construct
GGDYVWGTYRPHYYYGMDV

SEQ ID NO: 1539 - protein, 19 aa, synthetic construct
GGDYVWGTYRPHYYYGMDV

SEQ ID NO: 1540 - protein, 19 aa, synthetic construct
GGDYVWGTYRPHYYYGMDV

SEQ ID NO: 1541 - protein, 19 aa, synthetic construct
GGDYVWGTYRPHYYYGMDV

SEQ ID NO: 1542 - protein, 19 aa, synthetic construct
GGDYVWGTYRPHYYYGMDV

SEQ ID NO: 1543 - protein, 19 aa, synthetic construct
GGDYVWGTYRPHYYYGMDV

SEQ ID NO: 1544 - protein, 19 aa, synthetic construct
GGDYVWGTYRPHYYYGMDV

SEQ ID NO: 1545 - protein, 19 aa, synthetic construct
GGDYVWGTYRPHYYYGMDV

SEQ ID NO: 1546 - protein, 19 aa, synthetic construct
GGDYVWGTYRPHYYYGMDV

SEQ ID NO: 1547 - protein, 19 aa, synthetic construct
GGDYVWGTYRPHYYYGMDV

SEQ ID NO: 1548 - protein, 19 aa, synthetic construct
GGDYVWGTYRPHYYYGMDV

SEQ ID NO: 1549 - protein, 19 aa, synthetic construct
GGDYVFGTYRPHYYYGMDV

SEQ ID NO: 1550 - protein, 19 aa, synthetic construct
GGDYVFGTYRPHYYYGMDV

SEQ ID NO: 1551 - protein, 12 aa, synthetic construct
DRTIFGVVLGDY

SEQ ID NO: 1552 - protein, 12 aa, synthetic construct
DRTIFGVLLGDY

SEQ ID NO: 1553 - protein, 19 aa, synthetic construct
GGDYVWGTYRPHYYYGMDV

SEQ ID NO: 1554 - protein, 12 aa, synthetic construct
GKVAGMPEAFEI

SEQ ID NO: 1555 - protein, 20 aa, synthetic construct
GGDYVWGSYRPYYYYYGMDV

SEQ ID NO: 1556 - protein, 12 aa, synthetic construct
GKVAGMPEAFEI

SEQ ID NO: 1557 - protein, 12 aa, synthetic construct
GKVAGMPEAFEI

SEQ ID NO: 1558 - protein, 12 aa, synthetic construct
GKVAGMPEAFEI

SEQ ID NO: 1559 - protein, 12 aa, synthetic construct
GKVAGMPEAFEI

SEQ ID NO: 1560 - protein, 12 aa, synthetic construct
GKVAGMPEAFEI

SEQ ID NO: 1561 - protein, 12 aa, synthetic construct
GKVAGMPEAFEI

SEQ ID NO: 1562 - protein, 20 aa, synthetic construct
GGDYVWGSYRPYYYYYGMDV

SEQ ID NO: 1563 - protein, 20 aa, synthetic construct
GGDYVWGSYRPYYYYYGMDV

SEQ ID NO: 1564 - protein, 20 aa, synthetic construct
GGDYVWGSYRPYYYYYGMDV

SEQ ID NO: 1565 - protein, 20 aa, synthetic construct
GGDYVWGSYRPYYYYYGMDV

SEQ ID NO: 1566 - protein, 20 aa, synthetic construct
GGDYVWGSYRPYYYYYGMDV

SEQ ID NO: 1567 - protein, 20 aa, synthetic construct
GGDYVWGSYRPYYYYYGMDV

SEQ ID NO: 1568 - protein, 20 aa, synthetic construct
GGDYVFGSYRPYYYYYGMDV

SEQ ID NO: 1569 - protein, 20 aa, synthetic construct
GGDYVFGSYRPYYYYYGMDV

SEQ ID NO: 1570 - protein, 12 aa, synthetic construct
GKVAGMPEAFEI

SEQ ID NO: 1571 - protein, 450 aa, synthetic construct
QVQLVESGGGVVQPGRSLRLSCAASGFTFSNYGMHWVRQAPGEGLEWVAAIWFDASDKYYADAVKGRFTISRDNSKNTLYLQMNSLRAEDTAVYYCARDQAIFGVVPDYWGQGTLVTVSSASTKGPSVFPLAPSSKSTSGGTAALGCLVKDYFPEPVTVSWNSGALTSGVHTFPAVLQSSGLYSLSSVVTVPSSSLGTQTYICNVNHKPSNTKVDKKVEPKSCDKTHTCPPCPAPELLGGPSVFLFPPKPKDTLMISRTPEVTCVVVDVSHEDPCVKFNWYVDGVEVHNAKTKPCEEQYGSTYRCVSVLTVLHQDWLNGKEYKCKVSNKALPAPIEKTISKAKGQPREPQVYTLPPSREEMTKNQVSLTCLVKGFYPSDIAVEWESNGQPENNYKTTPPVLDSDGSFFLYSKLTVDKSRWQQGNVFSCSVMHEALHNHYTQKSLSLSPGK

SEQ ID NO: 1572 - protein, 451 aa, synthetic construct
QVQLVESGGGVVQPGRSLRLSCTASGFTFSSYGIHWVRQAPGKGLEWVAVIWYDGSNKFHADSVKGRFTISRDNSKNTLYLQMNSLRAEDSAMYFCARGKVAGMPEAFEIWGQGTKVTVSSASTKGPSVFPLAPSSKSTSGGTAALGCLVKDYFPEPVTVSWNSGALTSGVHTFPAVLQSSGLYSLSSVVTVPSSSLGTQTYICNVNHKPSNTKVDKKVEPKSCDKTHTCPPCPAPELLGGPSVFLFPPKPKDTLMISRTPEVTCVVVDVSHEDPCVKFNWYVDGVEVHNAKTKPCEEQYGSTYRCVSVLTVLHQDWLNGKEYKCKVSNKALPAPIEKTISKAKGQPREPQVYTLPPSREEMTKNQVSLTCLVKGFYPSDIAVEWESNGQPENNYKTTPPVLDSDGSFFLYSKLTVDKSRWQQGNVFSCSVMHEALHNHYTQKSLSLSPGK

SEQ ID NO: 1573 - protein, 450 aa, synthetic construct
QVQLVESGGGVVQPGRSLRLSCAASGFTFSNYGMHWVRQAPGKGLEWVAAIWFDASDKYYADAVKGRFTISRDNSKNTLYLQMNSLRAEDTAVYYCARDQAIFGVVPDYWGQGTLVTVSSASTKGPSVFPLAPSSKSTSGGTAALGCLVKDYFPEPVTVSWNSGALTSGVHTFPAVLQSSGLYSLSSVVTVPSSSLGTQTYICNVNHKPSNTKVDKKVEPKSCDKTHTCPPCPAPELLGGPSVFLFPPKPKDTLMISRTPEVTCVVVDVSHEDPCVKFNWYVDGVEVHNAKTKPCEEQYGSTYRCVSVLTVLHQDWLNGKEYKCKVSNKALPAPIEKTISKAKGQPREPQVYTLPPSREEMTKNQVSLTCLVKGFYPSDIAVEWESNGQPENNYKTTPPVLDSDGSFFLYSKLTVDKSRWQQGNVFSCSVMHEALHNHYTQKSLSLSPGK

SEQ ID NO: 1574 - protein, 451 aa, synthetic construct
QVQLVESGGGVVQPGRSLRLSCTASGFTFSSYGIHWVRQAPGKGLEWVAVIWYDGSNKFHADSVKGRFTISRDNSKNTLYLQMNSLRAEDSAMYFCARGKVAGMPEAFEIWGQGTKVTVSSASTKGPSVFPLAPSSKSTSGGTAALGCLVKDYFPEPVTVSWNSGALTSGVHTFPAVLQSSGLYSLSSVVTVPSSSLGTQTYICNVNHKPSNTKVDKKVEPKSCDKTHTCPPCPAPELLGGPSVFLFPPKPKDTLMISRTPEVTCVVVDVSHEDPEVKFNWYVDGVEVHNAKTKPCEEQYGSTYRCVSVLTVLHQDWLNGKEYKCKVSNKALPAPIEKTISKAKGQPREPQVYTLPPSREEMCKNQVSLTCLVKGFYPSDIAVEWESNGQPENNYKTTPPVLDSDGSFFLYSKLTVDKSRWQQGNVFSCSVMHEALHNHYTQKSLSLSPGK

SEQ ID NO: 1575 - protein, 214 aa, synthetic construct
DIQLTQSPSSLSASVGDRVTITCRASQTISRFLNWYQQKPGKAPELLIYVASSLQSGVPSRFSGSGSGTCFTLTISSLQPEDFATYYCQQSYSTLISFGQGTKLEITRTVAAPSVFIFPPSDEQLKSGTASVVCLLNNFYPREAKVQWKVDNALQSGNSQESVTEQDSKDSTYSLSSTLTLSKADYEKHKVYACEVTHQGLSSPVTKSFNRGEC

SEQ ID NO: 1576 - protein, 29 aa, Homo sapiens
HSQGTFTSDYSKYLDSRRAQDFVQWLMNT

SEQ ID NO: 1577 - protein, 466 aa, Homo sapiens
MTTSPILQLLLRLSLCGLLLQRAETGSKGQTAGELYQRWERYRRECQETLAAAEPPSGLACNGSFDMYVCWDYAAPNATARASCPWYLPWHHHVAAGFVLRQCGSDGQWGLWRDHTQCENPEKNEAFLDQRLILERLQVMYTVGYSLSLATLLLALLILSLFRRLHCTRNYIHINLFTSFMLRAAAILSRDRLLPRPGPYLGDQALALWNQALAACRTAQIVTQYCVGANYTWLLVEGVYLHSLLVLVGGSEEGHFRYYLLLGWGAPALFVIPWVIVRYLYENTQCWERNEVKAIWWIIRTPILMTILINFLIFIRILGILLSKLRTRQMRCRDYRLRLARSTLTLVPLLGVHEVVFAPVTEEQARGALRFAKLGFEIFLSSFQGFLVSVLYCFINKEVQSEIRRGWHHCRLRRSLGEEQRQLPERAFRALPSGSGPGEVPTSRGLSSGTLPGPGNEASRELESYC

SEQ ID NO: 1578 - protein, 430 aa, Homo sapiens
MTTSPILQLLLRLSLCGLLLQRAETGSKGQTAGELYQRWERYRRECQETLAAAEPPSVAAGFVLRQCGSDGQWGLWRDHTQCENPEKNEAFLDQRLILERLQVMYTVGYSLSLATLLLALLILSLFRRLHCTRNYIHINLFTSFMLRAAAILSRDRLLPRPGPYLGDQALALWNQALAACRTAQIVTQYCVGANYTWLLVEGVYLHSLLVLVGGSEEGHFRYYLLLGWGAPALFVIPWVIVRYLYENTQCWERNEVKAIWWIIRTPILMTILINFLIFIRILGILLSKLRTRQMRCRDYRLRLARSTLTLVPLLGVHEVVFAPVTEEQARGALRFAKLGFEIFLSSFQGFLVSVLYCFINKEVQSEIRRGWHHCRLRRSLGEEQRQLPERAFRALPSGSGPGEVPTSRGLSSGTLPGPGNEASRELESYC

SEQ ID NO: 1579 - protein, 493 aa, synthetic construct
MTTSPILQLLLRLSLCGLLLQRAETGSKGQTAGELYQRWERYRRECQETLAAAEPPSGLACNGSFDMYVCWDYAAPNATARASCPWYLPWHHHVAAGFVLRQCGSDGQWGLWRDHTQCENPEKNEAFLDQRLILERLQVMYTVGYSLSLATLLLALLILSLFRRLHCTRNYIHINLFTSFMLRAAAILSRDRLLPRPGPYLGDQALALWNQALAACRTAQIVTQYCVGANYTWLLVEGVYLHSLLVLVGGSEEGHFRYYLLLGWGAPALFVIPWVIVRYLYENTQCWERNEVKAIWWIIRTPILMTILINFLIFIRILGILLSKLRTRQMRCRDYRLRLARSTLTLVPLLGVHEVVFAPVTEEQARGALRFAKLGFEIFLSSFQGFLVSVLYCFINKEVGRDPAAAPALWRRRGTAPPLSAIVSQVQSEIRRGWHHCRLRRSLGEEQRQLPERAFRALPSGSGPGEVPTSRGLSSGTLPGPGNEASRELESYC

SEQ ID NO: 1580 - protein, 460 aa, Mus musculus
MPLRLLLLLLWLWGLQWAETDSEGQTTTGELYQRWEHYGQECQKMLETTEPPSGLACNGSFDMYACWNYTAANTTARVSCPWYLPWFRQVSAGFVFRQCGSDGQWGSWRDHTQCENPEKNGAFQDQTLILERLQIMYTVGYSLSLTTLLLALLILSLFRRLHCTRNYIHMNLFTSFMLRAAAILTRDQLLPPLGPYTGDQAPTPWNQALAACRTAQIMTQYCVGANYTWLLVEGVYLHHLLVIVGRSEKGHFRCYLLLGWGAPALFVIPWVIVRYLRENTQCWERNEVKAIWWIIRTPILITILINFLIFIRILGILVSKLRTRQMRCPDYRLRLARSTLTLVPLLGVHEVVFAPVTEEQVEGSLRFAKLAFEIFLSSFQGFLVSVLYCFINKEVQSEIRQGWRHRRLRLSLQEQRPRPHQELAPRAVPLSSACREAAVGNALPSGMLHVPGDEVLESYC

SEQ ID NO: 1581 - protein, 230 aa, synthetic construct
MPLRLLLLLLWLWGLQWAETDSEGQTTTGELYQRWEHYGQECQKMLETTEPPSGLACNGSFDMYACWNYTAANTTARVSCPWYLPWFRQVSAGFVFRQCGSDGQWGSWRDHTQCENPEKNGAFQDQTLILERLQIMYTVGYSLSLTTLLLALLILSLFRRLHCTRNYIHMNLFTSFMLRAAAILTRDQLLPPLGPYTGDQAPTPWNQVLHRLLPGGTKTFPIYFRTFPHH

SEQ ID NO: 1582 - protein, 42 aa, Homo sapiens
YAEGTFISDYSIAMDKIHQQDFVNWLLAQKGKKNDWKHNITQ

SEQ ID NO: 1583 - protein, 42 aa, Mus musculus
YAEGTFISDYSIAMDKIRQQDFVNWLLAQRGKKSDWKHNITQ

SEQ ID NO: 1584 - protein, 42 aa, Rattus sp
YAEGTFISDYSIAMDKIRQQDFVNWLLAQKGKKNDWKHNLTQ

SEQ ID NO: 1585 - protein, 22 aa, Homo sapiens
MDMRVPAQLLGLLLLWLRGARC

SEQ ID NO: 1586 - protein, 19 aa, Homo sapiens
MAWALLLLTLLTQGTGSWA

SEQ ID NO: 1587 - protein, 29 aa, synthetic construct
  SITE 2: note = D-Serine
  SITE 16: note = Aib
  SITE 25: note = 5-bromo-L-tryptophan
HSQGTFTSDYSKYLDXKRAQDFVDXLLKT

SEQ ID NO: 1588 - protein, 29 aa, synthetic construct
  SITE 2: note = D-Serine
  SITE 16: note = Aib
  SITE 25: note = 5-bromo-L-tryptophan
HSQGTFTSDYSKYLDXRRAQDFVQXLLKT

SEQ ID NO: 1589 - protein, 29 aa, synthetic construct
  SITE 2: note = D-Serine
  SITE 16: note = Aib
  SITE 25: note = 5-bromo-L-tryptophan
HSQGTFTSDYSKYLDXRRAQDFVKXLLDT

SEQ ID NO: 1590 - protein, 29 aa, synthetic construct
  SITE 2: note = D-Serine
  SITE 16: note = Aib
  SITE 25: note = 5-bromo-L-tryptophan
HSQGTFTSDYSKYLDXKRAQDFVAXLLKT

SEQ ID NO: 1591 - protein, 29 aa, synthetic construct
  SITE 2: note = D-Serine
  SITE 16: note = Aib
  SITE 25: note = 5-bromo-L-tryptophan
HSQGTFTSDYSKYLDXRRAQDFVAXLLKT

SEQ ID NO: 1592 - protein, 29 aa, synthetic construct
  SITE 2: note = D-Serine
  SITE 16: note = Aib
  SITE 25: note = 5-bromo-L-tryptophan
HSQGTFTSDYSKYLDXKRAQDFVKXLLDT

SEQ ID NO: 1593 - protein, 29 aa, synthetic construct
  SITE 2: note = D-Serine
  SITE 16: note = Aib
  SITE 25: note = 5-bromo-L-tryptophan
HSQGTFTSDYSKYLDXKRAQDFVEXLLKT

SEQ ID NO: 1594 - protein, 29 aa, synthetic construct
  SITE 2: note = D-Serine
  SITE 16: note = Aib
  SITE 25: note = 5-bromo-L-tryptophan
  SITE 18: note = 2-naphthylalanine
HSQGTFTSDYSKYLDXRXAQDFVKXLLDT

SEQ ID NO: 1595 - protein, 29 aa, synthetic construct
  SITE 2: note = D-Serine
  SITE 16: note = Aib
  SITE 25: note = 5-bromo-L-tryptophan
  SITE 18: note = 2-naphthylalanine
HSQGTFTSDYSKYLDXRXAQDFVAXLLKT

SEQ ID NO: 1596 - protein, 29 aa, synthetic construct
  SITE 2: note = D-Serine
  SITE 16: note = Aib
HSQGTFTSDYSKYLDXRRAQDFVQWLLKT

SEQ ID NO: 1597 - protein, 29 aa, synthetic construct
  SITE 2: note = D-Serine
  SITE 16: note = Aib
HSQGTFTSDYSKYLDXRRAQDFVKWLLDT

SEQ ID NO: 1598 - protein, 29 aa, synthetic construct
  SITE 2: note = D-Serine
  SITE 16: note = Aib
HSQGTFTSDYSKYLDXRRAQDFVKWLEST

SEQ ID NO: 1599 - protein, 29 aa, synthetic construct
  SITE 2: note = D-Serine
  SITE 16: note = Aib
HSQGTFTSDYSKYLDXKRAQDFVQWLLKT

SEQ ID NO: 1600 - protein, 29 aa, synthetic construct
  SITE 2: note = D-Serine
  SITE 16: note = Aib
YSQGTFTSDYSKYLDXRRAQDFVQWLLKT

SEQ ID NO: 1601 - protein, 29 aa, synthetic construct
  SITE 2: note = Aib
  SITE 16: note = Aib
YXQGTFTSDYSKYLDXRRAQDFVQWLLKT

SEQ ID NO: 1602 - protein, 29 aa, synthetic construct
  SITE 2: note = D-Threonine
  SITE 16: note = Aib
HTQGTFTSDYSKYLDXRRAQDFVQWLLKT

SEQ ID NO: 1603 - protein, 29 aa, synthetic construct
  SITE 2: note = D-Serine
  SITE 16: note = Aib
HSQGTFTSDYSKYLDXRRAQDFVAWLLKT

SEQ ID NO: 1604 - protein, 29 aa, synthetic construct
  SITE 2: note = D-Serine
  SITE 16: note = Aib
  SITE 24: note = Aib
HSQGTFTSDYSKYLDXRRAQDFVXWLLKT

SEQ ID NO: 1605 - protein, 29 aa, synthetic construct
  SITE 2: note = D-Serine
  SITE 16: note = Aib
  SITE 24: note = Aib
HSQGTFTSDYSKYLDXRRAQDFVXWLEKT

SEQ ID NO: 1606 - protein, 29 aa, synthetic construct
  SITE 2: note = D-Serine
  SITE 16: note = Aib
HSQGTFTSDYSKYLDXRRAQDFVQYLLKT

SEQ ID NO: 1607 - protein, 29 aa, synthetic construct
  SITE 2: note = D-Serine
  SITE 16: note = Aib
  SITE 18: note = L-4,4'-biphenylalanine
HSQGTFTSDYSKYLDXRXAQDFVQWLLKT

SEQ ID NO: 1608 - protein, 29 aa, synthetic construct
  SITE 2: note = D-Serine
  SITE 16: note = Aib
  SITE 18: note = 2-naphthylalanine
HSQGTFTSDYSKYLDXRXAQDFVQWLLKT

SEQ ID NO: 1609 - protein, 29 aa, synthetic construct
  SITE 2: note = D-Serine
  SITE 16: note = Aib
  SITE 17: note = citrulline
HSQGTFTSDYSKYLDXXRAQDFVQWLLKT

SEQ ID NO: 1610 - protein, 29 aa, synthetic construct
  SITE 16: note = Aib
  SITE 27: note = Aad
HSQGTFTSDYSKYLDXRRAQDFVQWLXKT

SEQ ID NO: 1611 - protein, 29 aa, synthetic construct
  SITE 2: note = D-Serine
  SITE 16: note = Aib
HSQGTFTSDYSKYLDXQRAQDFVQWLLKT

SEQ ID NO: 1612 - protein, 29 aa, synthetic construct
  SITE 2: note = D-Serine
  SITE 16: note = Aib
HSQGTFHSDYSKYLDXRRAQDFVQWLLKE

SEQ ID NO: 1613 - protein, 29 aa, synthetic construct
  SITE 2: note = D-Serine
  SITE 16: note = Aib
HSQGTFTSDYSKYLDXRRAQDFVKWLLDS

SEQ ID NO: 1614 - protein, 29 aa, synthetic construct
  SITE 16: note = Aib
HSQGTFTSDYSKYLDXRRAQDFVGWLLKT

SEQ ID NO: 1615 - protein, 29 aa, synthetic construct
  SITE 2: note = D-Serine
  SITE 16: note = Aib
HSQGTFTSDYSKYLDXRRAQDFVDWLLKT

SEQ ID NO: 1616 - protein, 29 aa, synthetic construct
  SITE 2: note = D-Serine
  SITE 16: note = Aib
HSQGTFTSDYSKYLDXRRAQDFVDWLLKE

SEQ ID NO: 1617 - protein, 29 aa, synthetic construct
  SITE 2: note = D-Serine
  SITE 16: note = Aib
HSQGTFTSDYSKYLDXRRAQDFVHWLLKT

SEQ ID NO: 1618 - protein, 29 aa, synthetic construct
  SITE 2: note = D-Serine
  SITE 16: note = Aib
HSQGTFTSDYSKYLDXRRAQDFVKWLLKT

SEQ ID NO: 1619 - protein, 29 aa, synthetic construct
  SITE 2: note = D-Serine
  SITE 16: note = Aib
HSQGTFTSDYSKYLDXRRAQDFVNWLLKT

SEQ ID NO: 1620 - protein, 29 aa, synthetic construct
  SITE 2: note = D-Serine
  SITE 16: note = Aib
HSQGTFTSDYSKYLDXRRAQDFVTWLLKT

SEQ ID NO: 1621 - protein, 29 aa, synthetic construct
  SITE 2: note = D-Serine
  SITE 16: note = Aib
HSQGTFTSDYSKYLDXRRAQDFVEWLLKT

SEQ ID NO: 1622 - protein, 29 aa, synthetic construct
  SITE 2: note = D-Serine
  SITE 16: note = Aib
HSQGTFTSDYSKYLDXRRAQDFVQWLLKD

SEQ ID NO: 1623 - protein, 29 aa, synthetic construct
  SITE 2: note = D-Serine
  SITE 16: note = Aib
HSQGTFTSDYSKYLDXRRAQDFVQWLLKA

SEQ ID NO: 1624 - protein, 29 aa, synthetic construct
  SITE 2: note = D-Serine
  SITE 16: note = Aib
  SITE 25: note = L-beta-homotryptophan
HSQGTFTSDYSKYLDXRRAQDFVQXLLKT

SEQ ID NO: 1625 - protein, 29 aa, synthetic construct
  SITE 16: note = Aib
HSQGTFTSDYSKYLDXKRAQDFVKWLLDT

SEQ ID NO: 1626 - protein, 29 aa, synthetic construct
  SITE 2: note = D-Serine
  SITE 16: note = Aib
HSQGTFTSDYSKYLDXKRAQDFVDWLLKT

SEQ ID NO: 1627 - protein, 29 aa, synthetic construct
  SITE 2: note = D-Serine
  SITE 16: note = Aib
HSQGTFTSDYSKYLDXKRAQDFVEWLLKT

SEQ ID NO: 1628 - protein, 25 aa, synthetic construct
GGGGSGGGGSPAPAPAPAPAPASGG

SEQ ID NO: 1629 - protein, 25 aa, synthetic construct
GSPAPAPAPAPAPAPAPAPAPASGG

SEQ ID NO: 1630 - protein, 25 aa, synthetic construct
GGGGSGGGGSGGGGSGGGGSGGGGS

SEQ ID NO: 1631 - protein, 24 aa, synthetic construct
GSPAPAPAPAPAPAPAPAPAPASG

SEQ ID NO: 1632 - protein, 24 aa, synthetic construct
GSPAPAPAPAPAPAGGGGSGGGGS

SEQ ID NO: 1633 - protein, 17 aa, synthetic construct
GSPAPAPAPAPASGGGG

SEQ ID NO: 1634 - protein, 15 aa, synthetic construct
GSPAPAPAPAPASGG

SEQ ID NO: 1635 - protein, 13 aa, synthetic construct
GSPAPAPAPASGG

SEQ ID NO: 1636 - protein, 20 aa, synthetic construct
GGGGSGGGGSGGGGSGGGGS

SEQ ID NO: 1637 - protein, 21 aa, synthetic construct
GSGGGGSGGGGSGGGGSGGGG

SEQ ID NO: 1638 - protein, 15 aa, synthetic construct
GGGGSGGGGSGGGGS

SEQ ID NO: 1639 - protein, 16 aa, synthetic construct
GSGGGGSGGGGSGGGG

SEQ ID NO: 1640 - protein, 23 aa, synthetic construct
GAKAAAEKAAAEKAAAEKAAAEA

SEQ ID NO: 1641 - protein, 28 aa, synthetic construct
GAKAQADAKAQADAKAQADAKAQADSGG

SEQ ID NO: 1642 - protein, 17 aa, synthetic construct
  SITE 3..14: note = 4Hyp
GSXXXXXXXXXXXXSGG

SEQ ID NO: 1643-1646 - skipped (4 entries)

SEQ ID NO: 1647 - protein, 18 aa, synthetic construct
  SITE 2: note = 11 repeating units of CH2CH2O, where the C-terminus of the glycine at position 1 is connected to the repeating units via a -NHCH2CH2O- linkage and the N-terminus of the serine at position 3 is connected to the repeating units via a -CH2CH2C(O)- linkage (Gly-NHCH2CH2O(CH2CH2O)11-CH2CH2C(O)-Ser
GXSPAPAPAPAPAPASGG

SEQ ID NO: 1648 - protein, 8 aa, synthetic construct
GGGSGGGS

SEQ ID NO: 1649 - protein, 12 aa, synthetic construct
GGGSGGGSGGGS

SEQ ID NO: 1650 - protein, 16 aa, synthetic construct
GGGSGGGSGGGSGGGS

SEQ ID NO: 1651 - protein, 20 aa, synthetic construct
GGGSGGGSGGGSGGGSGGGS

SEQ ID NO: 1652 - protein, 24 aa, synthetic construct
GGGSGGGSGGGSGGGSGGGSGGGS

SEQ ID NO: 1653 - protein, 10 aa, synthetic construct
GGGGSGGGGS

SEQ ID NO: 1654 - protein, 30 aa, synthetic construct
GGGGSGGGGSGGGGSGGGGSGGGGSGGGGS

SEQ ID NO: 1655 - skipped

SEQ ID NO: 1656 - protein, 4 aa, synthetic construct
GGGG

SEQ ID NO: 1657 - protein, 5 aa, synthetic construct
GGGGG

SEQ ID NO: 1658 - protein, 7 aa, synthetic construct
GGGGGGG

SEQ ID NO: 1659 - protein, 6 aa, synthetic construct
GGGGGK

SEQ ID NO: 1660 - protein, 7 aa, synthetic construct
GGGGGKR

SEQ ID NO: 1661 - protein, 8 aa, synthetic construct
GGGKGGGG

SEQ ID NO: 1662 - protein, 8 aa, synthetic construct
GGGNGSGG

SEQ ID NO: 1663 - protein, 8 aa, synthetic construct
GGGCGGGG

SEQ ID NO: 1664 - protein, 5 aa, synthetic construct
GPNGG

SEQ ID NO: 1665 - protein, 5 aa, synthetic construct
GGGGS

SEQ ID NO: 1666 - protein, 6 aa, synthetic construct
GGEGGG

SEQ ID NO: 1667 - protein, 8 aa, synthetic construct
GGEEEGGG

SEQ ID NO: 1668 - protein, 5 aa, synthetic construct
GEEEG

SEQ ID NO: 1669 - protein, 4 aa, synthetic construct
GEEE

SEQ ID NO: 1670 - protein, 6 aa, synthetic construct
GGDGGG

SEQ ID NO: 1671 - protein, 7 aa, synthetic construct
GGDDDGG

SEQ ID NO: 1672 - protein, 5 aa, synthetic construct
GDDDG

SEQ ID NO: 1673 - protein, 4 aa, synthetic construct
GDDD

SEQ ID NO: 1674 - protein, 21 aa, synthetic construct
GGGGSDDSDEGSDGEDGGGGS

SEQ ID NO: 1675 - protein, 5 aa, synthetic construct
WEWEW

SEQ ID NO: 1676 - protein, 5 aa, synthetic construct
FEFEF

SEQ ID NO: 1677 - protein, 6 aa, synthetic construct
EEEWWW

SEQ ID NO: 1678 - protein, 6 aa, synthetic construct
EEEFFF

SEQ ID NO: 1679 - protein, 7 aa, synthetic construct
WWEEEWW

SEQ ID NO: 1680 - protein, 7 aa, synthetic construct
FFEEEFF

SEQ ID NO: 1681 - protein, 22 aa, synthetic construct
GSGSATGGSGSTASSGSGSATH

SEQ ID NO: 1682 - protein, 22 aa, synthetic construct
HGSGSATGGSGSTASSGSGSAT

SEQ ID NO: 1683 - protein, 19 aa, synthetic construct
AEAAAKEAAAKEAAAKAGG

SEQ ID NO: 1684-1687 - skipped (4 entries)

SEQ ID NO: 1688 - protein, 110 aa, synthetic construct
DIQMTQSPSSVSASVGDRVTITCRASQGISNWLAWYQRKPGKAPKLLIYAASSLQSGVPSRFSGSGSGTDFTLTISSLQPEDFAAYYCQQASSFPWTFGQGTRVEIKRTV

SEQ ID NO: 1689 - protein, 110 aa, synthetic construct
DIQMTQSPSSVSASVGDRVTITCRASQGISRRLAWYQQKPGKAPKLLIYAASSLQSGVPSRFSGSGSGTDFTLTISSLQPEDFATYYCQQANSFPFTFGPGTKVDIKRTV

SEQ ID NO: 1690 - protein, 110 aa, synthetic construct
DIQMTQSPSSLSASEGDRVTITCRASQGIRNDLGWYQQKPGKAPKRLIYAASSLQSGVPLRFSGSGSGTEFTLTISSLQPEDFATYYCLQYNSYPWTFGQGTKVEIKRTV

SEQ ID NO: 1691 - protein, 110 aa, synthetic construct
DIQMTQSPSSLSASVGDRVTITCRASQGMSNYLAWYQQKPRKVPKLLIYAASTLQSGVPSRFSGSGSGTDFTLTISSLQPEDVATYYCQKFNSAPFTFGPGTKVDIKRTV

SEQ ID NO: 1692 - protein, 110 aa, synthetic construct
DIQMTLSPSSLSASVGDRVTITCRASQGIRNDLGWYQQKPGKAPKRLIYAASSLQSGVPSRFSGSGSGTEFTLTISSLQPEDFATYYCLQYNSSPWTFGQGTEVEIKRTV

SEQ ID NO: 1693 - protein, 122 aa, synthetic construct
QVQLQESGPGLVKPSETLSLTCTVSGGSISHYYWSWIRQPPGKGLGWIGYIYYSGSTNYNPSLKSRVTISVDTSKNQFSLKLTSVTAADTAVYYCARARGDGYNYPDAFDIWGQGTMVTVSS

SEQ ID NO: 1694 - protein, 118 aa, synthetic construct
QVQLVESGGGVVQPGRSLRLSCAASGFTFSSYGMHWVRQAPGKGLEWVAVIWYDGSNKYYADSVKGRFTISRDNSKNTLYLQMNSLRAEDTAVYYCARYNWNYGMDVWGQGTTVTVSS

SEQ ID NO: 1695 - protein, 118 aa, synthetic construct
QVQLVESGGGVVQPGRSLRLSCAASGFTFSSYGMHWVRQAPGKGLEWVAVIWYDGSNKYYADSVKGRFTISRDNSKNTLYLQMNSLRAEDTAVYYCARYNFNYGMDVWGQGTTVTVSS

SEQ ID NO: 1696 - protein, 118 aa, synthetic construct
QVQLVESGGGVVQPGRSLRLSCAASGFTFSSYGMHWVRQAPGKGLEWVAVIWYDGSNKYYADSVKGRFTISRDNSKNTLYLQMNSLRAEDTAVYYCARYNYNYGMDVWGQGTTVTVSS

SEQ ID NO: 1697 - protein, 123 aa, synthetic construct
QVQLQESGPGLVKPSETLSLTCTVSGGSISSYYWSWIRQPPGKGLEWIGYIYYSGNTNSNPSLKSRVTISVDTSKNQFSLKLSSVTAADTAVYYCARTYYDSSGYYYRAFDIWGQGTMVTVSS

SEQ ID NO: 1698 - protein, 122 aa, synthetic construct
QVQLQESGPGLVKPLQTLSLTCTVSGGSISSGGYYWSWIRQHPGKGLEWIGYIYYSRSTYYNPSLKSRVTISVDTSKNQFSLKLSSVTAADTAVYYCARTGYSSGWYPFDYWGQGTLVTVSS

SEQ ID NO: 1699 - protein, 214 aa, synthetic construct
DIQMTQSPSSVSASVGDRVTITCRASQGISNWLAWYQRKPGKAPKLLIYAASSLQSGVPSRFSGSGSGTDFTLTISSLQPEDFAAYYCQQASSFPWTFGQGTRVEIKRTVAAPSVFIFPPSDEQLKSGTASVVCLLNNFYPREAKVQWKVDNALQSGNSQESVTEQDSKDSTYSLSSTLTLSKADYEKHKVYACEVTHQGLSSPVTKSFNRGEC

SEQ ID NO: 1700 - protein, 214 aa, synthetic construct
DIQMTQSPSSVSASVGDRVTITCRASQGISRRLAWYQQKPGKAPKLLIYAASSLQSGVPSRFSGSGSGTDFTLTISSLQPEDFATYYCQQANSFPFTFGPGTKVDIKRTVAAPSVFIFPPSDEQLKSGTASVVCLLNNFYPREAKVQWKVDNALQSGNSQESVTEQDSKDSTYSLSSTLTLSKADYEKHKVYACEVTHQGLSSPVTKSFNRGEC

SEQ ID NO: 1701 - protein, 214 aa, synthetic construct
DIQMTQSPSSLSASEGDRVTITCRASQGIRNDLGWYQQKPGKAPKRLIYAASSLQSGVPLRFSGSGSGTEFTLTISSLQPEDFATYYCLQYNSYPWTFGQGTKVEIKRTVAAPSVFIFPPSDEQLKSGTASVVCLLNNFYPREAKVQWKVDNALQSGNSQESVTEQDSKDSTYSLSSTLTLSKADYEKHKVYACEVTHQGLSSPVTKSFNRGEC

SEQ ID NO: 1702 - protein, 214 aa, synthetic construct
DIQMTQSPSSLSASVGDRVTITCRASQGMSNYLAWYQQKPRKVPKLLIYAASTLQSGVPSRFSGSGSGTDFTLTISSLQPEDVATYYCQKFNSAPFTFGPGTKVDIKRTVAAPSVFIFPPSDEQLKSGTASVVCLLNNFYPREAKVQWKVDNALQSGNSQESVTEQDSKDSTYSLSSTLTLSKADYEKHKVYACEVTHQGLSSPVTKSFNRGEC

SEQ ID NO: 1703 - protein, 214 aa, synthetic construct
DIQMTLSPSSLSASVGDRVTITCRASQGIRNDLGWYQQKPGKAPKRLIYAASSLQSGVPSRFSGSGSGTEFTLTISSLQPEDFATYYCLQYNSSPWTFGQGTEVEIKRTVAAPSVFIFPPSDEQLKSGTASVVCLLNNFYPREAKVQWKVDNALQSGNSQESVTEQDSKDSTYSLSSTLTLSKADYEKHKVYACEVTHQGLSSPVTKSFNRGEC

SEQ ID NO: 1704 - protein, 448 aa, synthetic construct
  VARIANT 448: note = Amino acid may be present or absent
QVQLQESGPGLVKPSETLSLTCTVSGGSISHYYWSWIRQPPGKGLGWIGYIYYSGSTNYNPSLKSRVTISVDTSKNQFSLKLTSVTAADTAVYYCARARGDGYNYPDAFDIWGQGTMVTVSSASTKGPSVFPLAPCSRSTSESTAALGCLVKDYFPEPVTVSWNSGALTSGVHTFPAVLQSSGLYSLSSVVTVPSSNFGTQTYTCNVDHKPSNTKVDKTVERKCCVECPPCPAPPVAGPSVFLFPPKPKDTLMISRTPEVTCVVVDVSHEDPEVQFNWYVDGVEVHNAKTKPREEQFNSTFRVVSVLTVVHQDWLNGKEYKCKVSNKGLPAPIEKTISKTKGQPREPQVYTLPPSREEMTKNQVSLTCLVKGFYPSDIAVEWESNGQPENNYKTTPPMLDSDGSFFLYSKLTVDKSRWQQGNVFSCSVMHEALHNHYTQKSLSLSPGK

SEQ ID NO: 1705 - protein, 444 aa, synthetic construct
  VARIANT 444: note = Amino acid may be present or absent
QVQLVESGGGVVQPGRSLRLSCAASGFTFSSYGMHWVRQAPGKGLEWVAVIWYDGSNKYYADSVKGRFTISRDNSKNTLYLQMNSLRAEDTAVYYCARYNWNYGMDVWGQGTTVTVSSASTKGPSVFPLAPCSRSTSESTAALGCLVKDYFPEPVTVSWNSGALTSGVHTFPAVLQSSGLYSLSSVVTVPSSNFGTQTYTCNVDHKPSNTKVDKTVERKCCVECPPCPAPPVAGPSVFLFPPKPKDTLMISRTPEVTCVVVDVSHEDPEVQFNWYVDGVEVHNAKTKPREEQFNSTFRVVSVLTVVHQDWLNGKEYKCKVSNKGLPAPIEKTISKTKGQPREPQVYTLPPSREEMTKNQVSLTCLVKGFYPSDIAVEWESNGQPENNYKTTPPMLDSDGSFFLYSKLTVDKSRWQQGNVFSCSVMHEALHNHYTQKSLSLSPGK

SEQ ID NO: 1706 - protein, 444 aa, synthetic construct
  VARIANT 444: note = Amino acid may be present or absent
QVQLVESGGGVVQPGRSLRLSCAASGFTFSSYGMHWVRQAPGKGLEWVAVIWYDGSNKYYADSVKGRFTISRDNSKNTLYLQMNSLRAEDTAVYYCARYNFNYGMDVWGQGTTVTVSSASTKGPSVFPLAPCSRSTSESTAALGCLVKDYFPEPVTVSWNSGALTSGVHTFPAVLQSSGLYSLSSVVTVPSSNFGTQTYTCNVDHKPSNTKVDKTVERKCCVECPPCPAPPVAGPSVFLFPPKPKDTLMISRTPEVTCVVVDVSHEDPEVQFNWYVDGVEVHNAKTKPREEQFNSTFRVVSVLTVVHQDWLNGKEYKCKVSNKGLPAPIEKTISKTKGQPREPQVYTLPPSREEMTKNQVSLTCLVKGFYPSDIAVEWESNGQPENNYKTTPPMLDSDGSFFLYSKLTVDKSRWQQGNVFSCSVMHEALHNHYTQKSLSLSPGK

SEQ ID NO: 1707 - protein, 444 aa, synthetic construct
  VARIANT 444: note = Amino acid may be present or absent
QVQLVESGGGVVQPGRSLRLSCAASGFTFSSYGMHWVRQAPGKGLEWVAVIWYDGSNKYYADSVKGRFTISRDNSKNTLYLQMNSLRAEDTAVYYCARYNYNYGMDVWGQGTTVTVSSASTKGPSVFPLAPCSRSTSESTAALGCLVKDYFPEPVTVSWNSGALTSGVHTFPAVLQSSGLYSLSSVVTVPSSNFGTQTYTCNVDHKPSNTKVDKTVERKCCVECPPCPAPPVAGPSVFLFPPKPKDTLMISRTPEVTCVVVDVSHEDPEVQFNWYVDGVEVHNAKTKPREEQFNSTFRVVSVLTVVHQDWLNGKEYKCKVSNKGLPAPIEKTISKTKGQPREPQVYTLPPSREEMTKNQVSLTCLVKGFYPSDIAVEWESNGQPENNYKTTPPMLDSDGSFFLYSKLTVDKSRWQQGNVFSCSVMHEALHNHYTQKSLSLSPGK

SEQ ID NO: 1708 - protein, 444 aa, synthetic construct
  VARIANT 444: note = Amino acid may be present or absent
QVQLVESGGGVVQPGRSLRLSCAASGFTFSSYGMHWVRQAPGKGLEWVAVIWYDGSNKYYADSVKGRFTISRDNSKNTLYLQMNSLRAEDTAVYYCARYNFNYGMDVWGQGTTVTVSSASTKGPSVFPLAPCSRSTSESTAALGCLVKDYFPEPVTVSWNSGALTSGVHTFPAVLQSSGLYSLSSVVTVPSSNFGTQTYTCNVDHKPSNTKVDKTVERKSSVECPPCPAPPVAGPSVFLFPPKPKDTLMISRTPEVTCVVVDVSHEDPEVQFNWYVDGVEVHNAKTKPREEQFNSTFRVVSVLTVVHQDWLNGKEYKCKVSNKGLPAPIEKTISKTKGQPREPQVYTLPPSREEMTKNQVSLTCLVKGFYPSDIAVEWESNGQPENNYKTTPPMLDSDGSFFLYSKLTVDKSRWQQGNVFSCSVMHEALHNHYTQKSLSLSPGK

SEQ ID NO: 1709 - protein, 444 aa, synthetic construct
  VARIANT 444: note = Amino acid may be present or absent
QVQLVESGGGVVQPGRSLRLSCAASGFTFSSYGMHWVRQAPGKGLEWVAVIWYDGSNKYYADSVKGRFTISRDNSKNTLYLQMNSLRAEDTAVYYCARYNYNYGMDVWGQGTTVTVSSASTKGPSVFPLAPCSRSTSESTAALGCLVKDYFPEPVTVSWNSGALTSGVHTFPAVLQSSGLYSLSSVVTVPSSNFGTQTYTCNVDHKPSNTKVDKTVERKSSVECPPCPAPPVAGPSVFLFPPKPKDTLMISRTPEVTCVVVDVSHEDPEVQFNWYVDGVEVHNAKTKPREEQFNSTFRVVSVLTVVHQDWLNGKEYKCKVSNKGLPAPIEKTISKTKGQPREPQVYTLPPSREEMTKNQVSLTCLVKGFYPSDIAVEWESNGQPENNYKTTPPMLDSDGSFFLYSKLTVDKSRWQQGNVFSCSVMHEALHNHYTQKSLSLSPGK

SEQ ID NO: 1710 - protein, 449 aa, synthetic construct
  VARIANT 444: note = Amino acid may be present or absent
QVQLQESGPGLVKPSETLSLTCTVSGGSISSYYWSWIRQPPGKGLEWIGYIYYSGNTNSNPSLKSRVTISVDTSKNQFSLKLSSVTAADTAVYYCARTYYDSSGYYYRAFDIWGQGTMVTVSSASTKGPSVFPLAPCSRSTSESTAALGCLVKDYFPEPVTVSWNSGALTSGVHTFPAVLQSSGLYSLSSVVTVPSSNFGTQTYTCNVDHKPSNTKVDKTVERKCCVECPPCPAPPVAGPSVFLFPPKPKDTLMISRTPEVTCVVVDVSHEDPEVQFNWYVDGVEVHNAKTKPREEQFNSTFRVVSVLTVVHQDWLNGKEYKCKVSNKGLPAPIEKTISKTKGQPREPQVYTLPPSREEMTKNQVSLTCLVKGFYPSDIAVEWESNGQPENNYKTTPPMLDSDGSFFLYSKLTVDKSRWQQGNVFSCSVMHEALHNHYTQKSLSLSPGK

SEQ ID NO: 1711 - protein, 448 aa, synthetic construct
  VARIANT 448: note = Amino acid may be present or absent
QVQLQESGPGLVKPLQTLSLTCTVSGGSISSGGYYWSWIRQHPGKGLEWIGYIYYSRSTYYNPSLKSRVTISVDTSKNQFSLKLSSVTAADTAVYYCARTGYSSGWYPFDYWGQGTLVTVSSASTKGPSVFPLAPCSRSTSESTAALGCLVKDYFPEPVTVSWNSGALTSGVHTFPAVLQSSGLYSLSSVVTVPSSNFGTQTYTCNVDHKPSNTKVDKTVERKCCVECPPCPAPPVAGPSVFLFPPKPKDTLMISRTPEVTCVVVDVSHEDPEVQFNWYVDGVEVHNAKTKPREEQFNSTFRVVSVLTVVHQDWLNGKEYKCKVSNKGLPAPIEKTISKTKGQPREPQVYTLPPSREEMTKNQVSLTCLVKGFYPSDIAVEWESNGQPENNYKTTPPMLDSDGSFFLYSKLTVDKSRWQQGNVFSCSVMHEALHNHYTQKSLSLSPGK

SEQ ID NO: 1712 - protein, 448 aa, synthetic construct
  VARIANT 448: note = Amino acid may be present or absent
QVQLVESGGGVVQPGRSLRLSCAASGFTFSSYGMHWVRQAPGKGLEWVAVIWYDGSNKYYADSVKGRFTISRDNSKNTLYLQMNSLRAEDTAVYYCARYNFNYGMDVWGQGTTVTVSSASTKGPSVFPLAPSSKSTSGGTAALGCLVKDYFPEPVTVSWNSGALTSGVHTFPAVLQSSGLYSLSSVVTVPSSSLGTQTYICNVNHKPSNTKVDKKVEPKSCDKTHTCPPCPAPELLGGPSVFLFPPKPKDTLMISRTPEVTCVVVDVSHEDPCVKFNWYVDGVEVHNAKTKPCEEQYGSTYRCVSVLTVLHQDWLNGKEYKCKVSNKALPAPIEKTISKAKGQPREPQVYTLPPSREEMTKNQVSLTCLVKGFYPSDIAVEWESNGQPENNYKTTPPVLDSDGSFFLYSKLTVDKSRWQQGNVFSCSVMHEALHNHYTQKSLSLSPGK

SEQ ID NO: 1713 - protein, 453 aa, synthetic construct
  VARIANT 453: note = Amino acid may be present or absent
QVQLQESGPGLVKPSETLSLTCTVSGGSISSYYWSWIRQPPGKGLEWIGYIYYSGNTNSNPSLKSRVTISVDTSKNQFSLKLSSVTAADTAVYYCARTYYDSSGYYYRAFDIWGQGTMVTVSSASTKGPSVFPLAPSSKSTSGGTAALGCLVKDYFPEPVTVSWNSGALTSGVHTFPAVLQSSGLYSLSSVVTVPSSSLGTQTYICNVNHKPSNTKVDKKVEPKSCDKTHTCPPCPAPELLGGPSVFLFPPKPKDTLMISRTPEVTCVVVDVSHEDPCVKFNWYVDGVEVHNAKTKPCEEQYGSTYRCVSVLTVLHQDWLNGKEYKCKVSNKALPAPIEKTISKAKGQPREPQVYTLPPSREEMTKNQVSLTCLVKGFYPSDIAVEWESNGQPENNYKTTPPVLDSDGSFFLYSKLTVDKSRWQQGNVFSCSVMHEALHNHYTQKSLSLSPGK

SEQ ID NO: 1714 - protein, 11 aa, synthetic construct
RASQGISNWLA

SEQ ID NO: 1715 - protein, 11 aa, synthetic construct
RASQGISRRLA

SEQ ID NO: 1716 - protein, 11 aa, synthetic construct
RASQGIRNDLG

SEQ ID NO: 1717 - protein, 11 aa, synthetic construct
RASQGMSNYLA

SEQ ID NO: 1718 - protein, 7 aa, synthetic construct
AASSLQS

SEQ ID NO: 1719 - protein, 7 aa, synthetic construct
AASTLQS

SEQ ID NO: 1720 - protein, 9 aa, synthetic construct
QQASSFPWT

SEQ ID NO: 1721 - protein, 9 aa, synthetic construct
QQANSFPFT

SEQ ID NO: 1722 - protein, 9 aa, synthetic construct
LQYNSYPWT

SEQ ID NO: 1723 - protein, 9 aa, synthetic construct
QKFNSAPFT

SEQ ID NO: 1724 - protein, 9 aa, synthetic construct
LQYNSSPWT

SEQ ID NO: 1725 - protein, 5 aa, synthetic construct
HYYWS

SEQ ID NO: 1726 - protein, 5 aa, synthetic construct
SYGMH

SEQ ID NO: 1727 - protein, 5 aa, synthetic construct
SYYWS

SEQ ID NO: 1728 - protein, 7 aa, synthetic construct
SGGYYWS

SEQ ID NO: 1729 - protein, 16 aa, synthetic construct
YIYYSGSTNYNPSLKS

SEQ ID NO: 1730 - protein, 17 aa, synthetic construct
VIWYDGSNKYYADSVKG

SEQ ID NO: 1731 - protein, 16 aa, synthetic construct
YIYYSGNTNSNPSLKS

SEQ ID NO: 1732 - protein, 16 aa, synthetic construct
YIYYSRSTYYNPSLKS

SEQ ID NO: 1733 - protein, 14 aa, synthetic construct
ARGDGYNYPDAFDI

SEQ ID NO: 1734 - protein, 9 aa, synthetic construct
YNWNYGMDV

SEQ ID NO: 1735 - protein, 9 aa, synthetic construct
YNFNYGMDV

SEQ ID NO: 1736 - protein, 9 aa, synthetic construct
YNYNYGMDV

SEQ ID NO: 1737 - protein, 15 aa, synthetic construct
TYYDSSGYYYRAFDI

SEQ ID NO: 1738 - protein, 12 aa, synthetic construct
TGYSSGWYPFDY

SEQ ID NO: 1739 - protein, 26 aa, synthetic construct
  SITE 26: note = L-propargylglycine
GSPAPAPAPAPAPAPAPAPAPASGGX

SEQ ID NO: 1740 - skipped

SEQ ID NO: 1741 - protein, 24 aa, synthetic construct
APAPAPAPAPAPAGGGGSGGGGSK

SEQ ID NO: 1742 - protein, 22 aa, synthetic construct
APAPAPAPAPAPAPAPAPAPAK

SEQ ID NO: 1743 - protein, 21 aa, synthetic construct
GGGGSGGGGSGGGGSGGGGSK

SEQ ID NO: 1744 - protein, 16 aa, synthetic construct
GGGGSGGGGSGGGGSK

SEQ ID NO: 1745 - protein, 26 aa, synthetic construct
GGSAPAPAPAPAPAPAPAPAPAPSGK

SEQ ID NO: 1746 - protein, 16 aa, synthetic construct
GGGGSGGGGSGGGGSK

SEQ ID NO: 1747 - protein, 29 aa, synthetic construct
  SITE 2: note = D-Serine
  SITE 16: note = Aib
  SITE 24: note = D-Glutamine
HSQGTFTSDYSKYLDXRRAQDFVQWLLKT

SEQ ID NO: 1748 - protein, 29 aa, synthetic construct
  SITE 2: note = D-Serine
  SITE 16: note = Aib
HSQGTFTSDYSKYLDXARAQDFVQWLLKT

SEQ ID NO: 1749 - protein, 29 aa, synthetic construct
  SITE 16: note = Aib
HSQGTFTSDYSKYLDXRRAQDFVQWLLKT

SEQ ID NO: 1750 - protein, 29 aa, synthetic construct
  SITE 2: note = D-Serine
  SITE 16: note = Aib
  SITE 27: note = 6-azido-L-lysine
HSQGTFTSDYSKYLDXRRAQDFVQWLLXT

SEQ ID NO: 1751 - protein, 29 aa, synthetic construct
  SITE 2: note = Aib
YXQGTFTSDYSKYLDSRRAQDFVQWLLKT

SEQ ID NO: 1752 - protein, 29 aa, synthetic construct
HSQGTFTSDYSKYLDAKRAQEFVEWLLKS

SEQ ID NO: 1753 - protein, 29 aa, synthetic construct
  SITE 16: note = Aib
  SITE 25: note = 5-bromo-L-tryptophan
HSQGTFTSDYSKYLDXRRAQDFVEXLLKT

SEQ ID NO: 1754 - protein, 29 aa, synthetic construct
  SITE 2: note = D-Serine
  SITE 16: note = Aib
FSQGTFTSDYSKYLDXRRAQDFVQWLLKT

SEQ ID NO: 1755 - protein, 29 aa, synthetic construct
  SITE 2: note = D-Serine
  SITE 16: note = Aib
  SITE 20: note = 4-chloro-L-phenylalanine
HSQGTFTSDYSKYLDXRRAXDFVQWLLKT

SEQ ID NO: 1756 - protein, 29 aa, synthetic construct
  SITE 2: note = D-Serine
  SITE 16: note = Aib
  SITE 25: note = 5-methoxy-L-tryptophan
HSQGTFTSDYSKYLDXRRAQDFVQXLLKT

SEQ ID NO: 1757 - protein, 29 aa, synthetic construct
  SITE 2: note = D-Serine
  SITE 16: note = Aib
  SITE 25: note = 5-methyl-L-tryptophan
HSQGTFTSDYSKYLDXRRAQDFVQXLLKT

SEQ ID NO: 1758 - protein, 29 aa, synthetic construct
  SITE 2: note = D-Serine
  SITE 16: note = Aib
  SITE 25: note = 6-bromo-L-tryptophan
HSQGTFTSDYSKYLDXRRAQDFVQXLLKT

SEQ ID NO: 1759 - protein, 29 aa, synthetic construct
  SITE 2: note = D-Serine
  SITE 16: note = Aib
  SITE 25: note = 6-chloro-L-tryptophan
HSQGTFTSDYSKYLDXRRAQDFVQXLLKT

SEQ ID NO: 1760 - protein, 29 aa, synthetic construct
  SITE 2: note = D-Serine
  SITE 16: note = Aib
  SITE 25: note = 6-methyl-L-tryptophan
HSQGTFTSDYSKYLDXRRAQDFVQXLLKT

SEQ ID NO: 1761 - protein, 29 aa, synthetic construct
  SITE 2: note = D-Serine
  SITE 16: note = Aib
  SITE 25: note = 7-methyl-L-tryptophan
HSQGTFTSDYSKYLDXRRAQDFVQXLLKT

SEQ ID NO: 1762 - protein, 29 aa, synthetic construct
  SITE 2: note = D-Serine
  SITE 16: note = Aib
HSQGTFTSDYSKYLDXRAAQDFVKWLEDS

SEQ ID NO: 1763 - protein, 29 aa, synthetic construct
  SITE 2: note = D-Serine
  SITE 16: note = Aib
HSQGTFTSDYSKYLDXRRAADFVAWLLKT

SEQ ID NO: 1764 - protein, 29 aa, synthetic construct
  SITE 2: note = D-Serine
  SITE 16: note = Aib
HSQGTFTSDYSKYLDXRRAQDFVQWLEKT

SEQ ID NO: 1765 - protein, 29 aa, synthetic construct
  SITE 2: note = D-Serine
  SITE 16: note = Aib
HSQGTFTSDYSKYLDXQRAQDFVQWLEKT

SEQ ID NO: 1766 - protein, 29 aa, synthetic construct
  SITE 2: note = D-Serine
  SITE 16: note = Aib
HSQGTFTSDYSKYLDXRRAQDWVQWLLKT

SEQ ID NO: 1767 - protein, 29 aa, synthetic construct
  SITE 2: note = D-Serine
  SITE 16: note = Aib
YSQGTFTSDYSKYLDXRRAQDFVKWLEDS

SEQ ID NO: 1768 - protein, 29 aa, synthetic construct
  SITE 2: note = D-Serine
  SITE 16: note = Aib
YSQGTFTSDYSKYLDXQRAQDFVKWLEDS

SEQ ID NO: 1769 - protein, 29 aa, synthetic construct
  SITE 2: note = D-Serine
  SITE 16: note = Aib
  SITE 21: note = citrulline
HSQGTFTSDYSKYLDXRRAQXFVQWLLKT

SEQ ID NO: 1770 - protein, 29 aa, synthetic construct
  SITE 2: note = D-Serine
  SITE 16: note = Aib
HSQGTFTSDYSKYLDXRRAQDFVQWLLKE

SEQ ID NO: 1771 - protein, 29 aa, synthetic construct
  SITE 2: note = D-Serine
  SITE 16: note = Aib
  SITE 18: note = citrulline
HSQGTFTSDYSKYLDXRXAQDFVQWLLKT

SEQ ID NO: 1772 - protein, 29 aa, synthetic construct
  SITE 2: note = D-Serine
  SITE 16: note = Aib
  SITE 20: note = D-Glutamine
HSQGTFTSDYSKYLDXRRAQDFVQWLLKT

SEQ ID NO: 1773 - protein, 29 aa, synthetic construct
  SITE 2: note = D-Serine
  SITE 16: note = Aib
  SITE 21: note = D-Aspartic acid
HSQGTFTSDYSKYLDXRRAQDFVQWLLKT

SEQ ID NO: 1774 - protein, 29 aa, synthetic construct
  SITE 2: note = D-Serine
  SITE 16: note = Aib
HSQGTFHSDYSKYLDXRRAQDFVQWLLKT

SEQ ID NO: 1775 - protein, 29 aa, synthetic construct
  SITE 2: note = D-Serine
  SITE 16: note = Aib
HSQGTFTSDYSKYLDXRRAQDFVRWLLKT

SEQ ID NO: 1776 - protein, 29 aa, synthetic construct
  SITE 2: note = D-Serine
  SITE 16: note = Aib
HSQGTFTSDYSKYLDXRRAQDFVFWLLKT

SEQ ID NO: 1777 - protein, 29 aa, synthetic construct
  SITE 2: note = D-Serine
  SITE 16: note = Aib
HSQGTFTSDYSKYLDXRRAQDFVLWLLKT

SEQ ID NO: 1778 - protein, 29 aa, synthetic construct
  SITE 2: note = D-Serine
  SITE 16: note = Aib
HSQGTFTSDYSKYLDXRRAQDFVSWLLKT

SEQ ID NO: 1779 - protein, 29 aa, synthetic construct
  SITE 2: note = D-Serine
  SITE 16: note = Aib
HSQGTFTSDYSKYLDXRRAQDFVYWLLKT

SEQ ID NO: 1780 - protein, 29 aa, synthetic construct
  SITE 2: note = D-Serine
  SITE 16: note = Aib
HSQGTFTSDYSKYLDXRRAQDFVVWLLKT

SEQ ID NO: 1781 - protein, 29 aa, synthetic construct
  SITE 2: note = D-Serine
  SITE 16: note = Aib
HSQGTFTSDYSKYLDXRRAQDFVIWLLKT

SEQ ID NO: 1782 - protein, 29 aa, synthetic construct
  SITE 2: note = D-Serine
  SITE 16: note = Aib
  SITE 24: note = homoserine
HSQGTFTSDYSKYLDXRRAQDFVXWLLKT

SEQ ID NO: 1783 - protein, 29 aa, synthetic construct
  SITE 2: note = D-Serine
  SITE 16: note = Aib
  SITE 24: note = Dpr
HSQGTFTSDYSKYLDXRRAQDFVXWLLKT

SEQ ID NO: 1784 - protein, 29 aa, synthetic construct
  SITE 2: note = D-Serine
HSQGTFTSDYSKYLDQRRAQDFVQWLLKT

SEQ ID NO: 1785 - protein, 29 aa, synthetic construct
  SITE 2: note = D-Serine
  SITE 16: note = Aib
  SITE 20: note = homoserine
HSQGTFTSDYSKYLDXRRAXDFVQWLLKT

SEQ ID NO: 1786 - protein, 29 aa, synthetic construct
  SITE 2: note = D-Serine
  SITE 16: note = Aib
HSQGTFTSDYSKYLDXRKAQEFVQWLLKT

SEQ ID NO: 1787 - protein, 29 aa, synthetic construct
  SITE 2: note = D-Serine
  SITE 16: note = Aib
HSQGTFTSDYSKYLDXRRAQDFVKWLESE

SEQ ID NO: 1788 - protein, 29 aa, synthetic construct
  SITE 2: note = D-Serine
  SITE 16: note = Aib
HSQGTFTSDYSKYLDXRRAQDFVKWLLDE

SEQ ID NO: 1789 - protein, 31 aa, synthetic construct
  SITE 2: note = D-Serine
  SITE 16: note = Aib
HSQGTFTSDYSKYLDXRRAQDFVQWLLDTKK

SEQ ID NO: 1790 - protein, 29 aa, synthetic construct
  SITE 2: note = D-Serine
  SITE 16: note = Aib
HSQGTFTSDYSKYLDXQRAQDFVAWLEKE

SEQ ID NO: 1791 - protein, 29 aa, synthetic construct
  SITE 2: note = D-Serine
  SITE 16: note = Aib
HSQGTFFSDYSKYLDXRRAQDFVQWLLKE

SEQ ID NO: 1792 - protein, 29 aa, synthetic construct
  SITE 2: note = D-Serine
  SITE 16: note = homophenylalanine
HSQGTFTSDYSKYLDXRRAQDFVQWLLKT

SEQ ID NO: 1793 - protein, 29 aa, synthetic construct
  SITE 2: note = D-Serine
  SITE 16: note = Aib
HSQGTFTSDYSKYLDXRRAQDFVEWLLDS

SEQ ID NO: 1794 - protein, 29 aa, synthetic construct
  SITE 2: note = D-Serine
  SITE 16: note = Aib
  SITE 22: note = beta-cyclohexyl-L-alanine
HSQGTFTSDYSKYLDXRRAQDXVQWLLKT

SEQ ID NO: 1795 - protein, 29 aa, synthetic construct
  SITE 2: note = D-Serine
  SITE 16: note = Aib
HSQGTFTSDWSKYLDXRRAQDFVQWLLKT

SEQ ID NO: 1796 - protein, 29 aa, synthetic construct
  SITE 2: note = D-Serine
  SITE 16: note = Aib
HSQGTFTSDYSKYLDXRRAQDFVAWLEKE

SEQ ID NO: 1797 - protein, 29 aa, synthetic construct
  SITE 2: note = D-Serine
  SITE 16: note = Aib
HSQGTFTSDYSKYLDXRRAQDFVKWLEDS

SEQ ID NO: 1798 - protein, 29 aa, synthetic construct
  SITE 2: note = D-Serine
  SITE 16: note = Aib
  SITE 18: note = 2-naphthylalanine
HSQGTFTSDYSKYLDXRXAQDFVKWLLDT

SEQ ID NO: 1799 - protein, 29 aa, synthetic construct
  SITE 2: note = D-Serine
  SITE 16: note = Aib
HSQGTFTSDYSKYLDXRRAQDFVAWLLDS

SEQ ID NO: 1800 - protein, 29 aa, synthetic construct
  SITE 2: note = D-Serine
  SITE 16: note = Aib
HSQGTFTSDYSKYLDXRRAQDFVAWLLDE

SEQ ID NO: 1801 - protein, 29 aa, synthetic construct
  SITE 2: note = D-Serine
  SITE 16: note = Aib
HSQGTFTSDYSKYLDXKRAQDFVAWLLKE

SEQ ID NO: 1802 - protein, 29 aa, synthetic construct
  SITE 2: note = D-Serine
  SITE 16: note = Aib
HSQGTFTSDYSKYLDXRRAQDFVAWLLKE

SEQ ID NO: 1803 - protein, 29 aa, synthetic construct
  SITE 2: note = D-Serine
  SITE 16: note = Aib
HSQGTFTSDYSKYLDXRRAQDFVDWLEKE

SEQ ID NO: 1804 - protein, 29 aa, synthetic construct
  SITE 2: note = D-Serine
  SITE 16: note = Aib
HSQGTFTSDYSKYLDXRRAHDFVKWLLNT

SEQ ID NO: 1805 - protein, 29 aa, synthetic construct
  SITE 2: note = D-Serine
  SITE 16: note = Aib
HSQGTFTSDYSKYLDXRRAQDFVKWLLDS

SEQ ID NO: 1806 - protein, 29 aa, synthetic construct
  SITE 2: note = D-Serine
  SITE 16: note = Aib
HSQGTFTSDYSKYLDXRRAQDFVDWLLKS

SEQ ID NO: 1807 - protein, 29 aa, synthetic construct
  SITE 2: note = D-Serine
  SITE 16: note = Aib
HSQGTFTSDYSKYLDXRRAQDFVEWLLKN

SEQ ID NO: 1808 - protein, 29 aa, synthetic construct
  SITE 2: note = D-Serine
  SITE 16: note = Aib
  SITE 25: note = 5-bromo-L-tryptophan
HSQGTFTSDYSKYLDXRRAQDFVDXLLKT

SEQ ID NO: 1809 - protein, 29 aa, synthetic construct
  SITE 2: note = D-Serine
  SITE 16: note = Aib
  SITE 25: note = 5-bromo-L-tryptophan
HSQGTFTSDYSKYLDXRRAQDFVAXLLKE

SEQ ID NO: 1810 - protein, 29 aa, synthetic construct
  SITE 2: note = D-Serine
  SITE 16: note = Aib
  SITE 25: note = 5-bromo-L-tryptophan
HSQGTFTSDYSKYLDXRRAQDFVAXLLKS

SEQ ID NO: 1811 - protein, 29 aa, synthetic construct
  SITE 2: note = D-Serine
  SITE 16: note = Aib
  SITE 25: note = 5-bromo-L-tryptophan
HSQGTFTSDYSKYLDXRRAQDFVKXLLDE

SEQ ID NO: 1812 - protein, 29 aa, synthetic construct
  SITE 2: note = D-Serine
  SITE 16: note = Aib
  SITE 25: note = 5-bromo-L-tryptophan
HSQGTFTSDYSKYLDXRRAQDFVKXLLDS

SEQ ID NO: 1813 - protein, 29 aa, synthetic construct
  SITE 2: note = D-Serine
  SITE 16: note = Aib
  SITE 25: note = 5-bromo-L-tryptophan
HSQGTFHSDYSKYLDXRRAQDFVAXLLKT

SEQ ID NO: 1814 - protein, 29 aa, synthetic construct
  SITE 2: note = D-Serine
  SITE 16: note = Aib
  SITE 25: note = 5-bromo-L-tryptophan
HSQGTFHSDYSKYLDXRRAQDFVAXLLKS

SEQ ID NO: 1815 - protein, 29 aa, synthetic construct
  SITE 2: note = D-Serine
  SITE 16: note = Aib
  SITE 25: note = 5-bromo-L-tryptophan
HSQGTFTSDYSKYLDXRRAQDFVDXLLKS

SEQ ID NO: 1816 - protein, 29 aa, synthetic construct
  SITE 2: note = D-Serine
  SITE 16: note = Aib
  SITE 25: note = 5-bromo-L-tryptophan
HSQGTFTSDYSKYLDXRRAQDFVEXLLKT

SEQ ID NO: 1817 - protein, 29 aa, synthetic construct
  SITE 2: note = D-Serine
  SITE 16: note = Aib
  SITE 25: note = 5-bromo-L-tryptophan
HSQGTFTSDYSKYLDXRRAQDFVEXLLKS

SEQ ID NO: 1818 - protein, 29 aa, synthetic construct
  SITE 2: note = D-Serine
  SITE 16: note = Aib
HSQGTFTSDYSKYLDXKRAQDFVEWLLKS

SEQ ID NO: 1819 - protein, 29 aa, synthetic construct
  SITE 2: note = D-Serine
  SITE 16: note = Aib
HSQGTFTSDYSKYLDXKRAQDFVEWLLKD

SEQ ID NO: 1820 - protein, 29 aa, synthetic construct
  SITE 2: note = D-Serine
  SITE 16: note = Aib
HSQGTFTSDYSKYLDXKRAQDFVEWLEKT

SEQ ID NO: 1821 - protein, 29 aa, synthetic construct
  SITE 2: note = D-Serine
  SITE 16: note = Aib
HSQGTFTSDYSKYLDXKRAQEFVKWLLET

SEQ ID NO: 1822 - protein, 29 aa, synthetic construct
  SITE 2: note = D-Serine
  SITE 16: note = Aib
HSQGTFTSDYSKYLDXKRAQEFVKWLLES

SEQ ID NO: 1823 - protein, 29 aa, synthetic construct
  SITE 2: note = D-Serine
  SITE 16: note = Aib
HSQGTFTSDYSKYLDXKRAQDFVEWLLKE

SEQ ID NO: 1824 - protein, 29 aa, synthetic construct
  SITE 2: note = D-Serine
  SITE 16: note = Aib
HSQGTFTSDYSKYLDXKRARDFVEWLLKE

SEQ ID NO: 1825 - protein, 29 aa, synthetic construct
  SITE 2: note = D-Serine
  SITE 16: note = Aib
HSQGTFTSDYSKYLDXKRAQEFVEWLLKS

SEQ ID NO: 1826 - protein, 29 aa, synthetic construct
  SITE 2: note = D-Serine
  SITE 16: note = Aib
HSQGTFTSDYSKYLDXKRAQEFVEWLLKD

SEQ ID NO: 1827 - protein, 29 aa, synthetic construct
  SITE 2: note = D-Serine
  SITE 16: note = Aib
HSQGTFTSDYSKYLDXKRAQEFVEWLLKT

SEQ ID NO: 1828 - protein, 29 aa, synthetic construct
  SITE 2: note = D-Serine
  SITE 16: note = Aib
HSQGTFTSDYSKYLDXKRAREFVEWLLKS

SEQ ID NO: 1829 - protein, 29 aa, synthetic construct
  SITE 2: note = D-Serine
HSQGTFTSDYSKYLDEKRAQEFVEWLLKS

SEQ ID NO: 1830 - protein, 29 aa, synthetic construct
  SITE 2: note = D-Serine
  SITE 16: note = Aib
HSQGTFTSDYSKYLDXKRAQEFVEWLLKE

SEQ ID NO: 1831 - protein, 29 aa, synthetic construct
  SITE 2: note = D-Serine
  SITE 16: note = Aib
HSQGTFTSDYSKYLDXKRAQEFVEWLLES

SEQ ID NO: 1832 - protein, 29 aa, synthetic construct
  SITE 2: note = D-Serine
  SITE 16: note = Aib
HSQGTFTSDYSKYLDXKRAQEFVEWLLEE

SEQ ID NO: 1833 - protein, 29 aa, synthetic construct
  SITE 2: note = D-Serine
  SITE 16: note = Aib
HSQGTFTSDYSKYLEXKRAQEFVKWLLES

SEQ ID NO: 1834 - protein, 29 aa, synthetic construct
  SITE 2: note = D-Serine
HSQGTFTSDYSKYLDEKRAREFVEWLLKS

SEQ ID NO: 1835 - protein, 29 aa, synthetic construct
  SITE 2: note = D-Serine
  SITE 16: note = Aib
HSEGTFTSDYSKYLDXKRAQEFVEWLLKS

SEQ ID NO: 1836 - protein, 29 aa, synthetic construct
  SITE 2: note = D-Serine
  SITE 16: note = Aib
HSQGTFTSDYSKYLDXKAAQEFVEWLLKS

SEQ ID NO: 1837 - protein, 29 aa, synthetic construct
  SITE 2: note = D-Serine
  SITE 16: note = Aib
HSQGTFTSDYSKYLDXKRAEEFVKWLLES

SEQ ID NO: 1838 - protein, 29 aa, synthetic construct
  SITE 2: note = D-Serine
  SITE 16: note = Aib
HSQGTFTSDYSKYLDXKRAQEFVKWLLAS

SEQ ID NO: 1839 - protein, 29 aa, synthetic construct
  SITE 2: note = D-Serine
  SITE 16: note = Aib
HSQGTFTSDYSKYLEXKRAQEFVEWLLKS

SEQ ID NO: 1840 - protein, 29 aa, synthetic construct
  SITE 2: note = D-Serine
  SITE 16: note = Aib
HSQGTFTSDYSKYLDXRRAQDFVAWLLKT

SEQ ID NO: 1841 - protein, 24 aa, synthetic construct
GGGGSGGGGSAPAPAPAPAPAPAK

SEQ ID NO: 1842 - protein, 24 aa, synthetic construct
GGGGSGGGGSAPAPAPAPAPGGSK

SEQ ID NO: 1843 - protein, 29 aa, synthetic construct
GPSGGGGSGGGGSAPAPAPAPAPAPGGSK

SEQ ID NO: 1844 - protein, 29 aa, synthetic construct
GPSGGSAPAPAPAPAPAPGGGGSGGGGSK

SEQ ID NO: 1845 - protein, 32 aa, synthetic construct
GPSSGAPPPSAPAPAPAPAPAPAPAPAPAPAK

SEQ ID NO: 1846 - protein, 26 aa, synthetic construct
GPSSGAPPPSGGGGSGGGGSGGGGSK

SEQ ID NO: 1847 - protein, 26 aa, synthetic construct
GSAPAPAPAPAPAPAPAPAPAPGGSK

SEQ ID NO: 1848 - protein, 31 aa, synthetic construct
PSSGAPPPSAPAPAPAPAPAPAPAPAPAPAK

SEQ ID NO: 1849 - protein, 25 aa, synthetic construct
PSSGAPPPSGGGGSGGGGSGGGGSK

SEQ ID NO: 1850 - protein, 25 aa, synthetic construct
GQPAPAPAPAPAPAPAPAPAPAQGG

SEQ ID NO: 1851 - protein, 25 aa, synthetic construct
GGGGQGGGGQPAPAPAPAPAPAQGG

SEQ ID NO: 1852 - protein, 29 aa, synthetic construct
GPSGSAPAPAPAPAPAPAPAPAPAPGGSK

SEQ ID NO: 1853 - protein, 452 aa, synthetic construct
QVQLQESGPGLVKPSQTLSLTCTVSGGSISSGDYFWSWIRQLPGKGLEWIGHIHNSGTTYYNPSLKSRVTISVDTSKKQFSLRLSSVTAADTAVYYCARDRGGDYAYGMDVWGQGTTVTVSSASTKGPSVFPLAPSSKSTSGGTAALGCLVKDYFPEPVTVSWNSGALTSGVHTFPAVLQSSGLYSLSSVVTVPSSSLGTQTYICNVNHKPSNTKVDKRVEPKSCDKTHTCPPCPAPELLGGPSVFLFPPKPKDTLMISRTPEVTCVVVDVSHEDPEVKFNWYVDGVEVHNAKTKPCEEQYGSTYRCVSVLTVLHQDWLNGKEYKCKVSNKALPAPIEKTISKAKGQPREPQVYTLPPSREEMCKNQVSLTCLVKGFYPSDIAVEWESNGQPENNYKTTPPVLDSDGSFFLYSKLTVDKSRWQQGNVFSCSVMHEALHNHYTQKSLSLSPGK

SEQ ID NO: 1854 - protein, 452 aa, synthetic construct
QVQLQESGPGLVKPSQTLSLTCTVSGGSISSGDYFWSWIRQLPGKGLEWIGHIHNSGTTYYNPSLKSRVTISVDTSKKQFSLRLSSVTAADTAVYYCARDRGGDYAYGMDVWGQGTTVTVSSASTKGPSVFPLAPSSKSTSGGTAALGCLVKDYFPEPVTVSWNSGALTSGVHTFPAVLQSSGLYSLSSVVTVPSSSLGTQTYICNVNHKPSNTKVDKRVEPKSCDKTHTCPPCPAPELLGGPSVFLFPPKPKDTLMISRTPEVTCVVVDVSHEDPCVKFNWYVDGVEVHNAKTKPCEEQYGSTYRCVSVLTVLHQDWLNGKEYKCKVSNKALPAPIEKTISKAKGQPREPQVYTLPPSREEMTKNQVSLTCLVKGFYPSDIAVEWESNGQPENNYKTTPPVLDSDGSFFLYSKLTVDKSRWQQGNVFSCSVMHEALHNHYTQKSLSLSPGK

SEQ ID NO: 1855 - protein, 452 aa, synthetic construct
QVQLQESGPGLVKPSQTLSLTCTVSGGSISSGDYFWSWIRQLPGKGLEWIGHIHNSGTTYYNPSLKSRVTISVDTSKKQFSLRLSSVTAADTAVYYCARDRGGDYAYGMDVWGQGTTVTVSSASTKGPSVFPLAPSSKSTSGGTAALGCLVKDYFPEPVTVSWNSGALTSGVHTFPAVLQSSGLYSLSSVVTVPSSSLGTQTYICNVNHKPSNTKVDKRVEPKSCDKTHTCPPCPAPELLGGPSVFLFPPKPKDTLMISRTPEVTCVVVDVSHEDPEVKFNWYVDGVEVHNAKTKPCEEQYGSTYRCVSVLTVLHQDWLNGKEYKCKVSNKALPAPIEKTISKAKGQPREPQVYTLPPSREEMTKNQVSLTCLVKGFYPSDIAVEWESNGQPENNYKTTPPVLDSDGSFFLYSKLTVDKSRWQQGNVFSCSVMHEALHNHYTQKSLSLSPGK

SEQ ID NO: 1856 - protein, 215 aa, synthetic construct
EIVLTQSPGTLSLSPGERATLSCRASQGISRSELAWYQQKPGQAPSLLIYGASSRATGIPDRFSGSGSGTDFTLTISRLEPEDFAVYYCQQFGSSPWTFGQGTKVEIKRTVAAPSVFIFPPSDEQLKSGTASVVCLLNNFYPREAKVQWKVDNALQSGNSQESVTEQDSKDSTYSLSSTLTLSKADYEKHKVYACEVTHQGLSSPVTKSFNRGEC

SEQ ID NO: 1857 - protein, 215 aa, synthetic construct
EIVLTQSPGTLSLSPGERATLSCRASQGISRSELAWYQQKPGQAPSLLIYGASSRATGIPDRFSGSGSGTCFTLTISRLEPEDFAVYYCQQFGSSPWTFGQGTKVEIKRTVAAPSVFIFPPSDEQLKSGTASVVCLLNNFYPREAKVQWKVDNALQSGNSQESVTEQDSKDSTYSLSSTLTLSKADYEKHKVYACEVTHQGLSSPVTKSFNRGEC

SEQ ID NO: 1858 - protein, 227 aa, synthetic construct
DKTHTCPPCPAPELLGGPSVFLFPPKPKDTLMISRTPEVTCVVVDVSHEDPEVKFNWYVDGVEVHNAKTKPCEEQYGSTYRCVSVLTVLHQDWLNGKEYKCKVSNKALPAPIEKTISKAKGQPREPQVYTLPPSREEMCKNQVSLTCLVKGFYPSDIAVEWESNGQPENNYKTTPPVLDSDGSFFLYSKLTVDKSRWQQGNVFSCSVMHEALHNHYTQKSLSLSPGK

SEQ ID NO: 1859 - protein, 29 aa, synthetic construct
HSQGTFTSDYSKYLDSRRAQDFVKWLMKT

SEQ ID NO: 1860 - protein, 29 aa, synthetic construct
HSQGTFTSDYSKYLDSRRAQKFVKWLMNT

SEQ ID NO: 1861 - protein, 29 aa, synthetic construct
  SITE 2: note = D-Serine
  SITE 16: note = Aib
YSQGTFTSDYSKYLDXQRAQDFVQWLEKE

SEQ ID NO: 1862 - protein, 29 aa, synthetic construct
  SITE 2: note = D-Serine
  SITE 16: note = Aib
  SITE 17: note = D-Arginine
HSQGTFTSDYSKYLDXRRAQDFVQWLLKT

SEQ ID NO: 1863 - protein, 29 aa, synthetic construct
  SITE 2: note = D-Serine
  SITE 16: note = Aib
  SITE 25: note = 5-bromo-L-tryptophan
  SITE 28: note = Lysine in position number 28 is linked via an amide linkage to the C-terminal glycine of SEQ ID NO: 1864
HSQGTFTSDYSKYLDXKRAQDFVDXLLKT

SEQ ID NO: 1864 - protein, 25 aa, synthetic construct
  SITE 25: note = C-terminal glycine is linked via an amide linkage to the lysine in position number 28 of SEQ ID NO: 1863
GGGGSGGGGSPAPAPAPAPAPASGG

SEQ ID NO: 1865 - protein, 29 aa, synthetic construct
  SITE 2: note = D-Serine
  SITE 16: note = Aib
  SITE 28: note = Lysine in position number 28 is linked via an amide linkage to the C-terminal glycine of SEQ ID NO: 1866
HSQGTFTSDYSKYLDXKRAQDFVDWLLKT

SEQ ID NO: 1866 - protein, 25 aa, synthetic construct
  SITE 25: note = C-terminal glycine is linked via an amide linkage to the lysine in position number 28 of SEQ ID NO: 1865
GSPAPAPAPAPAPAPAPAPAPASGG

SEQ ID NO: 1867 - protein, 29 aa, synthetic construct
  SITE 2: note = D-Serine
  SITE 16: note = Aib
  SITE 28: note = Lysine in position number 28 is linked via an amide linkage to the C-terminal glycine of SEQ ID NO: 1868
HSQGTFTSDYSKYLDXKRAQDFVDWLLKT

SEQ ID NO: 1868 - protein, 25 aa, synthetic construct
  SITE 25: note = C-terminal glycine is linked via an amide linkage to the lysine in position number 28 of SEQ ID NO: 1867
GGGGSGGGGSPAPAPAPAPAPASGG

SEQ ID NO: 1869 - protein, 29 aa, synthetic construct
  SITE 2: note = D-Serine
  SITE 16: note = Aib
  SITE 28: note = Lysine in position number 28 is linked via an amide linkage to the C-terminal glycine of SEQ ID NO: 1870
HSQGTFTSDYSKYLDXKRAQEFVEWLLKS

SEQ ID NO: 1870 - protein, 25 aa, synthetic construct
  SITE 25: note = Glycine in position number 25 is linked via an amide linkage to the lysine in position number 28 of SEQ ID NO: 1869
GGGGSGGGGSPAPAPAPAPAPASGG

SEQ ID NO: 1871 - protein, 29 aa, synthetic construct
  SITE 2: note = D-Serine
  SITE 16: note = Aib
  SITE 25: note = 5-bromo-L-tryptophan
  SITE 28: note = Lysine in position number 28 is linked via an amide linkage to C-terminal glycine of SEQ ID NO: 1872
HSQGTFTSDYSKYLDXKRAQDFVDXLLKT

SEQ ID NO: 1872 - protein, 25 aa, synthetic construct
  SITE 25: note = C-terminal  glycine is linked via an amide linkage to the lysine in position number 28 of SEQ ID NO: 1871
  SITE 1: note = N-terminus is bromoacetylated
GGGGSGGGGSPAPAPAPAPAPASGG

SEQ ID NO: 1873 - protein, 29 aa, synthetic construct
  SITE 2: note = D-Serine
  SITE 16: note = Aib
  SITE 28: note = Lysine in position number 28 is linked via an amide linkage to C-terminal glycine of SEQ ID NO: 1874
HSQGTFTSDYSKYLDXKRAQDFVDWLLKT

SEQ ID NO: 1874 - protein, 25 aa, synthetic construct
  SITE 25: note = C-terminal glycine is linked via an amide linkage to the lysine in position number 28 of SEQ ID NO: 1873
  SITE 1: note = N-terminus is bromoacetylated
GSPAPAPAPAPAPAPAPAPAPASGG

SEQ ID NO: 1875 - protein, 29 aa, synthetic construct
  SITE 2: note = D-Serine
  SITE 16: note = Aib
  SITE 28: note = Lysine in position number 28 is linked via an amide linkage to C-terminal glycine of SEQ ID NO: 1876
HSQGTFTSDYSKYLDXKRAQDFVDWLLKT

SEQ ID NO: 1876 - protein, 25 aa, synthetic construct
  SITE 25: note = C-terminal glycine is linked via an amide linkage to the lysine in position number 28 of SEQ ID NO: 1875
  SITE 1: note = N-terminus is bromoacetylated
GGGGSGGGGSPAPAPAPAPAPASGG

SEQ ID NO: 1877 - protein, 29 aa, synthetic construct
  SITE 2: note = D-Serine
  SITE 16: note = Aib
  SITE 28: note = Lysine in position number 28 is linked via an amide linkage to C-terminal glycine of SEQ ID NO: 1878
HSQGTFTSDYSKYLDXKRAQEFVEWLLKS

SEQ ID NO: 1878 - protein, 25 aa, synthetic construct
  SITE 25: note = C-terminal  glycine is linked via an amide linkage to the lysine in position number 28 of SEQ ID NO: 1877
  SITE 1: note = N-terminus is bromoacetylated
GGGGSGGGGSPAPAPAPAPAPASGG

SEQ ID NO: 1879 - protein, 29 aa, synthetic construct
  SITE 2: note = D-Serine
  SITE 16: note = Aib
  SITE 28: note = Aad
HSQGTFTSDYSKYLDXRRAQDFVQWLXKT

SEQ ID NO: 1880 - protein, 29 aa, synthetic construct
  SITE 2: note = D-Serine
  SITE 16: note = Aib
HSQGTFTSDYSKYLDXRRAQDFVGWLLKT

SEQ ID NO: 1881 - protein, 29 aa, synthetic construct
  SITE 2: note = D-Serine
  SITE 16: note = Aib
HSQGTFTSDYSKYLDXKRAQDFVKWLLDT
